(19) United States
(12) Patent Application Publication
(10) Pub. No.: US 2025/0320452 A1
(43) Pub. Date: Oct. 16, 2025

(54) MICROORGANISMS AND USES THEREOF

(71) Applicant: United Kingdom Research and Innovation, Swindon (GB)

(72) Inventors: Wesley E. ROBERTSON, Swindon (GB); Louise F. H. FUNKE, Swindon (GB); Daniel DE LA TORRE, Swindon (GB); Julius FREDENS, Swindon (GB); Thomas S. ELLIOTT, Swindon (GB); Daniel L. DUNKELMANN, Swindon (GB); Julian C.W. WILLIS, Swindon (GB); Adam T. BEATTIE, Swindon (GB); Jason W. CHIN, Swindon (GB)

(21) Appl. No.: 19/092,488

(22) Filed: Mar. 27, 2025

Related U.S. Application Data
(63) Continuation of application No. 18/288,340, filed on Oct. 25, 2023.

(51) Int. Cl. C12N 1/20; C12N 9/00; C12N 15/10; C12R 1/19

(52) U.S. Cl. CPC C12N 1/20; C12N 9/93; C12N 15/1024; C12R 2001/19; C12Y 601/01

(57) ABSTRACT

The invention relates to prokaryotic cells for the production of polymers containing non-canonical amino acids, and to methods for making said cells. The invention also relates to newly obtainable polymers as produced by the cells of the invention. In addition, the invention relates to new orthogonal aminoacyl-tRNA synthetases (aaRSs) and orthogonal tRNAs, which may be used in pairs and find utility in host cells such as, but not limited to, the prokaryotic cells of the invention.

### SEQUENCE LISTING

[0001] The instant application contains a Sequence Listing which has been submitted electronically in XML format and is hereby incorporated by reference in its entirety. Said XML copy, created on Mar. 25, 2025, is named “51689-010003_Sequence_Listing_3_25_25.xml” and is 23,981,922 bytes in size.

### FIELD OF THE INVENTION

[0002] The present invention relates to novel prokaryotic cells for the production of polymers containing non-canonical amino acids, and to methods for making said cells. The invention also relates to newly obtainable polymers as produced by the prokaryotic cells of the invention. In addition, the invention relates to new orthogonal aminoacyl-tRNA synthetases (aaRSs) and orthogonal tRNAs, which may be used in pairs and find utility in host cells such as, but not limited to, the prokaryotic cells of the invention.

### BACKGROUND OF THE INVENTION

[0003] Nature uses 64 triplet codons to encode the synthesis of proteins composed of the twenty canonical amino acids, and most amino acids are encoded by more than one synonymous codon. It is widely hypothesized that removing sense codons and the tRNAs that read them from the genome may enable the creation of cells with several properties not found in natural biology-including new modes of viral resistance and the ability to encode the biosynthesis of non-canonical heteropolymers (3-6). However, these hypotheses have not been experimentally tested and so remain conjecture.

[0004] Removing release factor-1 (RF-1) (and therefore the ability to efficiently terminate translation on the TAG stop codon) from E. coli, provides some resistance to a limited subset of phage. However, this resistance is not general and phage are often propagated in the absence of RF-1 (8) because the TAG stop codon is rarely used for the termination of translation, and—even when viral genes do terminate in an amber codon—the inability to read a stop codon does not limit the synthesis of full-length viral proteins. In contrast, sense codons are commonly at least 10 times more abundant than amber codons in viral genomes, and occur over the length of viral genes.

[0005] Current strategies for encoding new monomers in cells are limited to encoding a single type of monomer (commonly in response to the amber stop codon) (3, 10, 11), inefficient, or incompatible with encoding sequential monomers (12-17); these limitations preclude the synthesis of non-canonical heteropolymer sequences composed entirely of non-canonical monomers.

[0006] Recently a strain of E. coli, Syn61, was created with a synthetic recoded genome in which all annotated occurrences of two sense codons (serine codons TCG and TCA) and a stop codon (TAG) were replaced with synonymous codons (18). This strain grows 1.6-fold slower than the strain from which it was derived.

[0007] A need, therefore, remains for new platforms for the synthesis of polymers containing non-canonical amino acids.

[0008] Some of the current platforms for the synthesis of polymers containing a non-canonical amino acid make use of an orthogonal aaRS/tRNA pair. Such pairs may be used to insert the non-canonical amino acid during protein synthesis. These pairs must be further engineered to decode a distinct target codon and to use a unique monomer that is not a substrate for other aaRSs.

[0009] Should a platform be developed that is capable of inserting multiple non-canonical amino acids into a polymer, it might need to make use of multiple aaRS/tRNA pairs. The identification of multiple engineered mutually orthogonal aaRS/tRNA pairs that recognise distinct codons and incorporate distinct non-canonical amino acids (ncAAs) remains an outstanding challenge. Each new ncAA, aaRS, tRNA and codon must function together and be orthogonal to each endogenous amino acid, aaRS and group of isoacceptor tRNAs and their cognate group of codons. Therefore, for each new ncAA:aaRS:tRNA:codon set, three interactions must be established (ncAA:aaRS, aaRS:tRNA and tRNA:codon) and 120 interactions (6×20 interactions; this analysis counts all isoacceptors for a natural amino acid as one and all codons for an amino acid as one and therefore provides a conservative estimate of the interactions that must be controlled) between the new set and the endogenous translational machinery must be minimised. Moreover, when incorporating more than one ncAA, there is the potential for interactions between components of the additional ncAA:aaRS:tRNA:codon sets, and these must also be minimised. Generating ncAA:aaRS:tRNA:codonsets to encode three distinct ncAAs into a polypeptide requires nine specific interactions to be established and minimization of at least 378 specific interactions, including 18 interactions between components of the three sets.

[0010] As such, a need exists for the provision of new orthogonal aaRS/tRNA pairs and for the identification of aaRS/tRNA pairs that would be functional if used in combination.

### SUMMARY OF THE INVENTION

[0011] Provided herein are prokaryotic cells that are suitable for the production of polymers containing non-canonical amino acids. The inventors demonstrate that it is possible to remove one, two, or more endogenous tRNAs from a prokaryotic cell, e.g. by deletion of the endogenous genes, to result in a viable cell. The inventors demonstrate that the removed endogenous tRNAs may be replaced with orthogonal tRNAs. The inventors further provide methods to overcome any growth defects that may be introduced by these processes. The inventors also provide experimental data showing that the modified prokaryotic cells are completely resistant to phage.

[0012] In an aspect of the invention, there is provided a prokaryotic cell, wherein: the prokaryotic cell does not express a first endogenous tRNA and a second endogenous tRNA; and the prokaryotic cell comprises a genome wherein a first type of sense codon and a second type of sense codon have been recoded such that the first endogenous tRNA and the second endogenous tRNA are dispensable.

[0013] In some embodiments, the essential genes of the genome do not contain occurrences of the first type of sense codon, and the first endogenous tRNA is a cognate tRNA for the first type of sense codon; and/or the essential genes of the genome do not contain occurrences of the second type of sense codon, and the second endogenous tRNA is a cognate tRNA for the second type of sense codon.

[0014] In some embodiments, the genome comprises 5, 4, 3, 2, 1, or no occurrences of the first type of sense codon, and the first endogenous tRNA is a cognate tRNA for the first type of sense codon; and/or the genome of comprises 5, 4, 3, 2, 1, or no occurrences of the second type of sense codon, and the second endogenous tRNA is a cognate tRNA for the second type of sense codon.

[0015] In some embodiments, the first type of sense codon is TCA and the first endogenous tRNA is tRNA^{Ser}_{UGA}; and/or the second type of sense codon is TCG and the second endogenous is tRNA^{Ser}_{CGA}. A plurality of occurrences of the TCA codon in the parental strain may have been replaced with AGT; and/or a plurality of occurrences of the TCG codon in the parental strain may have been replaced with AGC.

[0016] In some embodiments, the prokaryotic cell does not express a first endogenous release factor; and a first type of stop codon has been recoded within the genome such that the first endogenous release factor is dispensable.

[0017] The essential genes of the genome may not contain occurrences of the first type of stop codon, and the first endogenous release factor may be a cognate release factor for the first type of stop codon.

[0018] The genome may comprise 5, 4, 3, 2, 1, or no occurrences of the first type of stop codon, and the first endogenous release factor may be a cognate release factor for the first type of stop codon. The first type of stop codon may be TAG and wherein the first endogenous release factor may be RF-1. Occurrences of the TAG codon in the parental strain may have been replaced with TAA.

[0019] In some embodiments, the genome is at least 80%, 85%, 90%, 95%, 98%, 99%, 99.5%, 99.8%, 99.9%, or 100% identical to any one of SEQ ID NOs: 3 to 8.

[0020] In some embodiments, the prokaryotic cell expresses a first orthogonal aminoacyl-tRNA synthetase and a first orthogonal tRNA, the first orthogonal aminoacyl-tRNA synthetase and the first orthogonal tRNA form a first orthogonal aminoacyl-tRNA synthetase-tRNA pair, and the first orthogonal tRNA is capable of decoding the first type of sense codon.

[0021] The first orthogonal aminoacyl-tRNA synthetase may be MmPyIRS or a variant with altered selectivity to a non-canonical amino acid, and the first orthogonal tRNA may be MmtRNA^{PylY}_{YYY} or MmtRNA^{Pyl}_{UGA}.

[0022] In some embodiments, the prokaryotic cell expresses a second orthogonal aminoacyl-tRNA synthetase and a second tRNA, the second orthogonal aminoacyl-tRNA synthetase and the second orthogonal tRNA form a second orthogonal aminoacyl-tRNA synthetase-tRNA pair, and the second orthogonal tRNA is capable of decoding the second type of sense codon.

[0023] The second orthogonal aminoacyl-tRNA synthetase may be 1R26PyIRS or a variant with altered selectivity to a non-canonical amino acid, and the second orthogonal tRNA may be AlvtRNA^{ΔNPyl(8)}_{YYY} or AlvtRNA^{ΔNPyl(8)}_{CGA}.

[0024] In some embodiments, the prokaryotic cell expresses a third orthogonal aminoacyl-tRNA synthetase and a third orthogonal tRNA, the third orthogonal aminoacyl-tRNA synthetase and the third orthogonal tRNA form a third orthogonal aminoacyl-tRNA synthetase-tRNA pair, and the third orthogonal tRNA is capable of decoding the first type of stop codon.

[0025] The third orthogonal aminoacyl-tRNA synthetase-tRNA pair may be AfTyrRS or a variant with altered selectivity to a non-canonical amino acid, and Af-tRNA^{Tyr(A01)}_{YYY}; or MjTyrRS or a variant with altered selectivity to a non-canonical amino acid, and MjtRNA^{Tyr}_{YYY}.

[0026] The growth rate of the prokaryotic cell may be faster than the growth rate of a reference prokaryotic cell of a parental strain. The reference prokaryotic cell may be of a parental strain directly obtained upon recoding of the genome to remove the first type of sense codon, the second type of sense codon, and the first type of stop codon. The reference prokaryotic cell may be of a parental strain directly obtained upon removal of the first endogenous tRNA, the second endogenous tRNA, and the first endogenous release factor.

[0027] The prokaryotic cell may be resistant to phage infection and/or horizontal transfer of the F plasmid. The prokaryotic cell may be completely resistant to phage infection and/or horizontal transfer of the F plasmid.

[0028] The prokaryotic cell may be a bacterial cell or an Escherichia coli cell. The prokaryotic cell is viable.

[0029] In an aspect of the invention, there is provided a prokaryotic cell with a genome that is at least 80%, 85%, 90%, 95%, 98%, 99%, 99.5%, 99.8%, 99.9%, or 100% identical to any one of SEQ ID NOs: 3 to 8. The calculation of the sequence identity may exclude any exogenous sequences, for instance any sequences for the insertion of orthogonal aaRS/tRNA pairs.

[0030] In another aspect of the invention, there is provided a method for producing a modified prokaryotic cell, wherein the method comprises:
[0031] (i) modifying a prokaryotic cell to express a first orthogonal aminoacyl-tRNA synthetase-tRNA pair suitable for decoding a first type of sense codon, wherein
   [0032] the prokaryotic cell comprises a genome wherein the first type of sense codon has been recoded such that a first endogenous tRNA is dispensable;
[0033] (ii) incubating the prokaryotic cell in the presence of a non-canonical amino acid which is a substrate for the first orthogonal aminoacyl-tRNA synthetase; and
[0034] (iii) modifying the endogenous gene encoding the first endogenous tRNA such that the first endogenous tRNA is not expressed.

[0035] In an embodiment, steps (i) and (ii) are performed before step (iii). In another embodiment, step (iii) is performed before step (i) and (ii).

[0036] The method may further comprise:
[0037] (a) modifying the prokaryotic cell to express a second orthogonal aminoacyl-tRNA synthetase-tRNA pair suitable for decoding a second type of sense codon, wherein
   [0038] the prokaryotic cell comprises a genome wherein the second type of sense codon has been recoded such that a second endogenous tRNA is dispensable;
[0039] (b) incubating the prokaryotic cell in the presence of a non-canonical amino acid which is a substrate for the second orthogonal aminoacyl-tRNA synthetase; and
[0040] (c) modifying the endogenous gene encoding the second endogenous tRNA such that the second endogenous tRNA is not expressed.

[0041] In an embodiment, steps (i) and (ii) are performed before step (iii), and/or steps (a) and (b) are performed before step (c). In another embodiment, step (iii) is performed before steps (i) and (ii), and/or step (c) is performed before steps (a) and (b).

[0042] In some embodiments, steps (a), (b), and (c) are performed before steps (i), (ii), (iii); or step (a) is performed concurrently with step (i), step (b) is performed concurrently with step (ii), and step (c) is performed concurrently with step (iii); or steps (a), (b), and (c) are performed after steps (i), (ii), (iii).

[0043] The essential genes of the genome may not contain occurrences of the first type of sense codon, or the genome may comprise 5, 4, 3, 2, 1, or no occurrences of the first type of sense codon. The first type of sense codon may be TCA and the first endogenous tRNA may be tRNA^{Ser}_{UGA}. The TCA codon may have been replaced with AGT.

[0044] The first orthogonal aminoacyl-tRNA synthetase may be MmPyIRS or a variant with altered selectivity to a non-canonical amino acid, and the first orthogonal tRNA may be MmtRNA^{PylY}_{YYY} or MmtRNA^{Pyl}_{UGA}.

[0045] The essential genes of the genome may not contain occurrences of the second type of sense codon, or the genome of may comprise 5, 4, 3, 2, 1, or no occurrences of the second type of sense codon. The second type of sense codon may be TCG and the second endogenous tRNA may be tRNA^{Ser}_{CGA}. The TCG codon may be replaced with AGC.

[0046] The second orthogonal aminoacyl-tRNA synthetase may be 1R26PyIRS or a variant with altered selectivity to a non-canonical amino acid, and the second orthogonal tRNA may be AlvtRNA^{ΔNPyl(8)}_{YYY} or AlvtRNA^{ΔNPyl(8)}_{CGA}.

[0047] The genome of the prokaryotic cell to which the method is applied may be at least 80%, 85%, 90%, 95%, 98%, 99%, 99.5%, 99.8%, 99.9%, or 100% identical to any one of: GenBank accession number CP040347.1, SEQ ID NO: 3, or SEQ ID NO: 4.

[0048] The method may further comprise modifying the prokaryotic cell to express a third orthogonal aminoacyl-tRNA synthetase-tRNA pair suitable for decoding a first type of stop codon, wherein a first type of stop codon has been recoded within the genome such that a first endogenous release factor is dispensable. The essential genes of the genome may not contain occurrences of the first type of stop codon or the genome may comprise 5, 4, 3, 2, 1, or no occurrences of the first type of stop codon. The first type of stop codon may be TAG and wherein the cognate release factor for the first type of stop codon may be RF-1. The TAG codon may be replaced with TAA.

[0049] The third orthogonal aminoacyl-tRNA synthetase-tRNA pair may be AfTyrRS or a variant with altered selectivity to a non-canonical amino acid, and Af-tRNA^{Tyr(A01)}_{YYY}; or MjTyrRS or a variant with altered selectivity to a non-canonical amino acid, and MjtRNA^{Tyr}_{YYY}.

[0050] The method may comprise, prior to step (i) and (a):
[0051] inducing mutagenesis in a cell culture comprising the prokaryotic cell that comprises the recoded genome,
[0052] maintaining the cell culture under exponential growth conditions,
[0053] selecting a prokaryotic cell, from said cell culture, with an increased growth rate compared to the initial culture; and
[0054] wherein step (i) or (a) may be applied to the selected prokaryotic cell.

[0055] The mutagenesis, mutation, and selection may be part of a parallel mutagenesis and dynamic parallel selection process. The induction of mutagenesis may comprise the use of a mutagenesis plasmid. The mutagenesis plasmid may be MP6.

[0056] In an embodiment, prior to step (i), two rounds of mutagenesis and selection are applied.

[0057] The method may further comprises, after step (iii) and/or (c):
[0058] obtaining a cell culture from the prokaryotic cell,
[0059] inducing mutagenesis in the cell culture,
[0060] maintaining the cell culture under exponential growth conditions, and
[0061] selecting a prokaryotic cell, from said cell culture, with an increased growth rate compared to the initial culture.

[0062] The mutagenesis, mutation, and selection may be part of a parallel mutagenesis and dynamic parallel selection process. The induction of mutagenesis may comprise the use of a mutagenesis plasmid, wherein the mutagenesis plasmid does not contain any occurrences of the first or second type of sense codon nor any occurrences of the first type of stop codon. The mutagenesis plasmid may be MP6, wherein the MP6 has been recoded to not contain any occurrences of the first or second type of sense codon nor any occurrences of the first type of stop codon. Three rounds of mutagenesis and selection may be applied.

[0063] In methods of the invention, mutagenesis may be carried out for 5, 10, 15, 17, 20, 30, 45, 60, 70, 80, 100, 150, 200, or more generations; and/or the cell culture may be maintained under exponential growth conditions for 5, 10, 15, 20, 30, 40, 50, 52, 60, 70, 80, 100, 200, or more generations.

[0064] In some embodiments, the prokaryotic cell is a bacterial cell or an Escherichia coli cell.

[0065] In an aspect of the invention, there is provided a method of synthesising a polymer, comprising:
[0066] i) providing a prokaryotic cell of the invention, or generated according to the methods of the invention, wherein the prokaryotic cell comprises the first orthogonal aminoacyl-tRNA synthetase-tRNA pair; and
[0067] contacting said prokaryotic cell with a nucleic acid sequence encoding a polymer, said nucleic acid sequence comprising the first type of sense codon;
[0068] ii) incubating the prokaryotic cell in the presence of a first non-canonical amino acid, wherein the first non-canonical amino acid is a substrate for the first orthogonal aminoacyl-tRNA synthetase; and
[0069] iii) incubating the prokaryotic cell to allow incorporation of the first non-canonical amino acid into the polymer via the first orthogonal aminoacyl-tRNA synthetase-tRNA pair.

[0070] In an embodiment, the prokaryotic cell comprises the second orthogonal aminoacyl-tRNA synthetase-tRNA pair and the nucleic acid sequence comprises the second type of sense codon, and
[0071] step ii) comprises incubating the prokaryotic cell in the presence of a second non-canonical amino acid, wherein the second non-canonical amino acid is a substrate for the second orthogonal aminoacyl-tRNA synthetase; and
[0072] step iii) comprises incubating the prokaryotic cell to allow incorporation of the second non-canonical amino acid into the polymer via the second first orthogonal aminoacyl-tRNA synthetase-tRNA pair.

[0073] In another embodiment, the prokaryotic cell comprises the third orthogonal aminoacyl-tRNA synthetase-tRNA pair and the nucleic acid sequence comprises the first type of stop codon, and
[0074] step ii) comprises incubating the prokaryotic cell in the presence of a third non-canonical amino acid, wherein the third non-canonical amino acid is a substrate for the third orthogonal aminoacyl-tRNA synthetase; and
[0075] step iii) comprises incubating the prokaryotic cell to allow incorporation of the third non-canonical amino acid into the polymer via the third first orthogonal aminoacyl-tRNA synthetase-tRNA pair.

[0076] Any of the methods of synthesising a polymer, may further comprise purifying the synthesised polymer.

[0077] The synthesised polymer may comprise at least one non-canonical amino acid directly adjacent to another non-canonical amino acid. The polymer may comprises a chain of two, three, four, five, six, seven, eight, nine, ten, 15, 20, or more non-canonical amino acids directly adjacent to each other. The polymer may be a macrocycle. The non-canonical amino acids may be any one of, or any combination of, Bock, CbzK, Allock, p-I-Phe, CypK, AlkK, 3-Nitro-Tyr, and p-Az-Phe.

[0078] In an aspect of the invention, there is provided a polymer obtained from or obtainable by the methods of synthesising a polymer of the invention.

[0079] In an aspect of the invention, there is provided an isolated 1R26PyIRS, or a variant with altered selectivity to a non-canonical amino acid. The isolated 1R26PyIRS may be at least 50%, 60%, 70%, 80%, 90%, 95%, 99%, or 100% identical to SEQ ID NO: 9, comprising any one of the following groups of mutations: i) L121L, L125L, Y126G, M129L, N166N, V168V, Y206Y, A223A; ii) L121L, L125L, Y126Y, M129A, N166N, V168V, Y206F, A223A; iii) L121L, L125L, Y126Y, M129M, N166Q, V168V, Y206F, A223A; iv) L121L, L125L, Y126Y, M129M, N166S, V168M, Y206F, A223G; and v) L121M, L1251, Y126F, M129A, N166N, V168F, Y206Y, A223A. The isolated 1R26PyIRS may be at least 50%, 60%, 70%, 80%, 90%, 95%, 99%, or 100% similar or identical to any one of SEQ ID NOs: 10 to 14.

[0080] In an aspect of the invention, there is provided an isolated Archaeoglobus fulgidus tyrosyl-tRNA synthetase (AfTyrRS), or a variant with altered selectivity to a non-canonical amino acid. The isolated AfTyrRS may be at least 50%, 60%, 70%, 80%, 90%, 95%, 99%, or 100% identical to SEQ ID NO: 16, comprising any one of the following groups of mutations: i) Y361, L69M, H74L, Q116E, D165T, 1166G, and N190N; ii) Y36T, L69L, H74L, Q116E, D165T, 1166G, N190K; and iii) Y361, L69L, H74L, Q116E, D165T, 1166G, N190N. The isolated AfTyrRS may be at least 50%, 60%, 70%, 80%, 90%, 95%, 99%, or 100% similar or identical to any one of SEQ ID NOs: 16 to 19.

[0081] In an aspect of the invention, there is provided an isolated Lum1PyIRS, or a variant with altered selectivity to a non-canonical amino acid. The Lum1PyIRS may be at least 50%, 60%, 70%, 80%, 90%, 95%, 99%, or 100% identical to SEQ ID NO: 32, comprising any one of the following groups of mutations: i) L121L, L125L, Y126G, M129L, V168V; and ii) L121M, L1251, Y126F, M129A, V168F. The Lum1PyIRS may be at least 50%, 60%, 70%, 80%, 90%, 95%, 99%, or 100% similar or identical to any one of SEQ ID NOs: 32 to 34.

[0082] In an aspect of the invention, there is provided an isolated NitroPyIRS, or a variant with altered selectivity to a non-canonical amino acid. The NitroPyIRS may be at least 50%, 60%, 70%, 80%, 90%, 95%, 99%, or 100% identical to SEQ ID NO: 36, comprising the following substitutions L123M, L1271, Y128F, M131A, and V169F. The NitroPyIRS may be at least 50%, 60%, 70%, 80%, 90%, 95%, 99%, or 100% similar or identical to SEQ ID NO: 35 or SEQ ID NO: 36.

[0083] In an aspect of the invention, there is provided an isolated ClosΔNTDPyIRS, or a variant with altered selectivity to a non-canonical amino acid. The ClosΔNTDPyIRS may be at least 50%, 60%, 70%, 80%, 90%, 95%, 99%, or 100% identical to SEQ ID NO: 37, comprising any one of the following groups of mutations: i) Y126G, M129L, Y208Y, and ii) Y126Y, M129A, Y208F. The ClosΔNTDPyIRS may be at least 50%, 60%, 70%, 80%, 90%, 95%, 99%, or 100% similar or identical to any one of SEQ ID NOs: 37 to 39.

[0084] In an aspect of the invention, there is provided an isolated TronΔNTDPyIRS, or a variant with altered selectivity to a non-canonical amino acid. The TronΔNTDPyIRS may be at least 50%, 60%, 70%, 80%, 90%, 95%, 99%, or 100% similar or identical to SEQ ID NO: 40.

[0085] In an aspect of the invention, there is provided an isolated GemmΔNTDPyIRS, or a variant with altered selectivity to a non-canonical amino acid. The GemmΔNTDPyIRS may be at least 50%, 60%, 70%, 80%, 90%, 95%, 99%, or 100% similar or identical to SEQ ID NO: 41.

[0086] In an aspect of the invention, there is provided an isolated PGA8ΔNTDPyIRS, or a variant with altered selectivity to a non-canonical amino acid. The PGA8ΔNTDPyIRS may be at least 50%, 60%, 70%, 80%, 90%, 95%, 99%, or 100% similar or identical to SEQ ID NO: 42.

[0087] In an aspect of the invention, there is provided an isolated I2ΔNTDPyIRS, or a variant with altered selectivity to a non-canonical amino acid. The I2ΔNTDPyIRS may be at least 50%, 60%, 70%, 80%, 90%, 95%, 99%, or 100% similar or identical to SEQ ID NO: 43.

[0088] In an aspect of the invention, there is provided an isolated D121ΔNTDPyIRS, or a variant with altered selectivity to a non-canonical amino acid. The D121ΔNTDPyIRS may be at least 50%, 60%, 70%, 80%, 90%, 95%, 99%, or 100% similar or identical to SEQ ID NO: 44.

[0089] In an aspect of the invention, there is provided an isolated D416ΔNTDPyIRS, or a variant with altered selectivity to a non-canonical amino acid. The D416ΔNTDPyIRS may be at least 50%, 60%, 70%, 80%, 90%, 95%, 99%, or 100% similar or identical to SEQ ID NO: 45.

[0090] The tRNA synthetase of the invention may have altered selectivity towards any of: Allock, AlkK, Bock, Bta, CbzK, CypK, 3-Nitro-Tyr, NMH, p-I-Phe, and p-Az-Phe, and o-Methyl-Tyrosine.

[0091] In an aspect of the invention, there is provided an isolated tRNA, wherein the isolated tRNA is at least 80%, 90%, 95%, 99%, or 100% identical to any one of SEQ ID NOs: 15, 20, 46-52, 54-58, 61-66.

[0092] In an aspect of the invention, there is provided a host cell comprising a tRNA synthetase according to the invention and a tRNA, wherein the tRNA synthetase and tRNA form an orthogonal aminoacyl-tRNA synthetase-tRNA pair.

[0093] In an aspect of the invention, there is provided a host cell comprising any combination of two or three items selected from the list:
[0094] (i) the tRNA synthetase according to the invention and a tRNA, wherein the tRNA synthetase and tRNA form an orthogonal aminoacyl-tRNA synthetase-tRNA pair;
[0095] (ii) an Archaeoglobus fulgidus tyrosyl-tRNA synthetase (AfTyrRS), or a variant with altered selectivity to a non-canonical amino acid, and an Af-tRNA^{Tyr(A01)}_{YYY}, wherein the AfTyrRS and Af-tRNA^{Tyr(01)}_{YYY} form an orthogonal aminoacyl-tRNA synthetase-tRNA pair;
[0096] (iii) a MmPyIRS tRNA synthetase, or a variant with altered selectivity to a non-canonical amino acid, and a MmtRNA^{Pyl}_{YYY}, wherein the MmPyIRS tRNA synthetase and the MmtRNA^{Pyl}_{YYY} form an orthogonal aminoacyl-tRNA synthetase-tRNA pair.

[0097] In an aspect of the invention, there is provided a host cell comprising any combination of two or three items selected from the list:
[0098] (i) the tRNA synthetase according to the invention and a tRNA, wherein the tRNA synthetase and tRNA form an orthogonal aminoacyl-tRNA synthetase-tRNA pair;
[0099] (ii) an AfTyrRS, or a variant with altered selectivity to a non-canonical amino acid, and an Af-tRNA^{Tyr(A01)}_{YYY}, wherein the AfTyrRS and Af-tRNA^{Tyr(A01)}_{YYY} form an orthogonal aminoacyl-tRNA synthetase-tRNA pair;
[0100] (iii) an M jannaschii tyrosyl-tRNA synthetase (MjTyrRS), or a variant with altered selectivity to a non-canonical amino acid, and a MitRNA^{Tyr}_{YYY}, wherein the MjTyrRS and the MjtRNA^{Tyr}_{YYY} form an orthogonal aminoacyl-tRNA synthetase-tRNA pair.

[0101] In an aspect of the invention, there is provided a host cell comprising any combination of two or three items selected from the list: i) a class A ΔNPyIRS/^{ΔNPyl}tRNA pair; ii) a class B ΔNPyIRS/^{ΔNPyl}tRNA pair; and iii) an MmPyIRS/Spe^{Pyl}tRNA pair.

[0102] The host cell may be a prokaryotic cell or eukaryotic cell, a bacterial cell, an E. coli. cell, a mammalian cell, an insect cell, or a human cell.

[0103] In an aspect of the invention, there is provided a method for improving the growth rate of a prokaryotic cell wherein the genome has been recoded, wherein the method comprises:
[0104] inducing mutagenesis in a cell culture comprising the prokaryotic cell that comprises the recoded genome,
[0105] maintaining the cell culture under exponential growth conditions,
[0106] selecting a prokaryotic cell, from said cell culture, with an increased growth rate compared to the initial culture.

[0107] The mutagenesis, mutation, and selection may be part of a parallel mutagenesis and dynamic parallel selection process. The induction of mutagenesis may comprise the use of a mutagenesis plasmid. The mutagenesis plasmid may be a recoded mutagenesis plasmid, for instance recoded to remove a first and/or a second type of sense codon, and optionally a first type of stop codon. The mutagenesis plasmid may be MP6. Two rounds of mutagenesis and selection may be applied. The mutagenesis may be carried out for 5, 10, 15, 17, 20, 30, 45, 60, 70, 80, 100, 150, 200, or more generations; and/or the cell culture may be maintained under exponential growth conditions for 5, 10, 15, 20, 30, 40, 50, 52, 60, 70, 80, 100, 200, or more generations. The prokaryotic cell may be a bacterial cell or an Escherichia coli cell.

[0108] In an aspect of the invention, there is provided a prokaryotic cell obtained or obtainable by any of the methods for improving the growth rate of a prokaryotic cell of the invention, wherein the growth rate of the prokaryotic cell is faster than the growth rate of a reference prokaryotic cell of a parental strain.

[0109] In an aspect of the invention, there is provided a prokaryotic cell, wherein the prokaryotic cell: does not express a first endogenous tRNA; comprises a genome wherein a first type of sense codon has been recoded such that the first endogenous tRNA is dispensable; expresses a first orthogonal aminoacyl-tRNA synthetase and a first orthogonal tRNA, the first orthogonal aminoacyl-tRNA synthetase and the first orthogonal tRNA form a first orthogonal aminoacyl-tRNA synthetase-tRNA pair, and the first orthogonal tRNA is capable of decoding the first type of sense codon.

[0110] The essential genes of the genome may not contain occurrences of the first type of sense codon, and the first endogenous tRNA may be a cognate tRNA for the first type of sense codon. The genome may comprise 5, 4, 3, 2, 1, or no occurrences of the first type of sense codon, and the first endogenous tRNA may be a cognate tRNA for the first type of sense codon. The first type of sense codon may be TCA and the first endogenous tRNA may be tRNA^{Ser}_{UGA}; or the first type of sense codon may be TCG and the first endogenous may be tRNA^{Ser}_{CGA}. A plurality of occurrences of the TCA codon in the parental strain may have been replaced with AGT; and/or a plurality of occurrences of the TCG codon in the parental strain may have been replaced with AGC.

[0111] In a further embodiment, the prokaryotic cell does not express a second endogenous tRNA; comprises a genome wherein a second type of sense codon has been recoded such that the second endogenous tRNA is dispensable; expresses a second orthogonal aminoacyl-tRNA synthetase and a second tRNA, the second orthogonal aminoacyl-tRNA synthetase and the second orthogonal tRNA form a second orthogonal aminoacyl-tRNA synthetase-tRNA pair; and the second orthogonal tRNA is capable of decoding the second type of sense codon. The essential genes of the genome may not contain occurrences of the second type of sense codon, and the second endogenous tRNA may be a cognate tRNA for the second type of sense codon. The genome may comprise 5, 4, 3, 2, 1, or no occurrences of the second type of sense codon, and the second endogenous tRNA may be a cognate tRNA for the second type of sense codon. The second type of sense codon may be TCA and the second endogenous tRNA may be tRNA^{Ser}_{UGA}; or the second type of sense codon may be TCG and the second endogenous may be tRNA^{Ser}_{CGA}.

[0112] In a further embodiment, the prokaryotic cell does not express a first endogenous release factor; a first type of stop codon has been recoded within the genome such that the first endogenous release factor is dispensable; the prokaryotic cell expresses a third orthogonal aminoacyl-tRNA synthetase and a third orthogonal tRNA; the third orthogonal aminoacyl-tRNA synthetase and the third orthogonal tRNA form a third orthogonal aminoacyl-tRNA synthetase-tRNA pair; and the third orthogonal tRNA is capable of decoding the first type of stop codon. The essential genes of the genome may not contain occurrences of the first type of stop codon, and the first endogenous release factor may be a cognate release factor for the first type of stop codon. The genome may comprise 5, 4, 3, 2, 1, or no occurrences of the first type of stop codon, and the first endogenous release factor may be a cognate release factor for the first type of stop codon. The first type of stop codon may be TAG and wherein the first endogenous release factor may be RF-1. Occurrences of the TAG codon in the parental strain may have been replaced with TAA.

[0113] The prokaryotic cell may be a bacterial cell or an Escherichia coli cell. The prokaryotic cell is viable.

### BRIEF DESCRIPTION OF THE DRAWINGS

[0114] FIGS. 1A and 1B. Strain evolution and creation of Syn61Δ3.

[0115] (FIG. 1A) Schematic of strain evolution. The codons that encode serine and protein termination are connected to the anticodons of the tRNAs or release factors predicted to decode them by black lines. The genes encoding the corresponding tRNAs and release factors are indicated in the black boxes. Cells with the decoding rules of Syn61 are denoted with a pink box throughout. Two rounds of parallel mutagenesis and dynamic selection created Syn61, Syn61(ev2). serT, serU, and prfA were then deleted to create Syn61Δ3. Finally, three rounds of parallel mutagenesis and dynamic selection were applied to create Syn61Δ3(ev5); Syn61Δ3 and Syn61Δ3(ev5) are represented by the light teal box throughout.

[0116] (FIG. 1B) Growth rates of Syn61 and all intermediate strains in the development of Syn61Δ3(ev5). Growth rates were calculated based on growth curves measured for n=8 replicate cultures for each strain. For statistics see Methods.

[0117] FIGS. 2A-2G. Lytic phage propagation and cell lysis is obstructed in Syn61Δ3.

[0118] (FIG. 2A) Schematic of viral infection of Syn61Δ3. Deletion of serU (encoding tRNA^{Ser}_{CGA}), serT (encoding tRNA^{Ser}_{UGA}), and prfA (encoding RF-1) makes the UCG, UCA and UAG codons unreadable and the ribosome will stall at these codons within an mRNA that contains them, as shown here for a viral mRNA.

[0119] (FIG. 2B) Schematic of the number of TCG, TCA, and TAG codons and their positions in the genome of T6 phage.

[0120] (FIG. 2C) Cultures were infected with T6 phage at a multiplicity of infection (MOI) of 5·10⁻² and the total titer (intracellular phage plus free phage) was monitored over 4 hours. Treatment with gentamicin was used to ablate protein synthesis and provides a control for cells that cannot synthesize viral proteins or produce new viral particles.

[0121] (FIG. 2D) T6 efficiently lyses Syn61 variants but not Syn61Δ3. Cultures were infected as in FIG. 2C and OD₆₀₀ was measured after 4 hours.

[0122] (FIG. 2E) Number of the indicated codons per kb in each indicated phage.

[0123] (FIGS. 2F and 2G) Syn61Δ3 survives simultaneous infection of multiple phage: (FIG. 2F) photos of the culture at the indicated timepoints following infection (+) or without infection (−). Cultures were infected with phage λ, P1, T4, T6, and T7, each with MOI=1·10⁻². (FIG. 2G) OD₆₀₀ of the cultures was measured after 4 hours. All experiments were performed in three independent replicates, the dots represent the independent replicates and the line (FIG. 2C) or bar (FIGS. 2D and 2G) represents the mean. The photo (FIG. 2F) is a representative of data from three independent replicates.

[0124] FIGS. 3A-3I. Reassigning two sense codons and a stop codon to non-canonical amino acid (ncAAs) in Syn61Δ3.

[0125] (FIG. 3A) Schematic of each codon reassignment. Introduction of an orthogonal aminoacyl-tRNA synthetase/tRNA_{YYY} pair—where YYY is the sequence of the anticodon of the orthogonal tRNA (encoded by O-tRNA)—to Syn61Δ3 (light teal box, as described in FIG. 1A) enables decoding of the cognate codon (XXX) introduced into a gene of interest. The orthogonal pair directs the incorporation of a non-canonical amino acid (ncAA) in response to the XXX codon. These codon reassignments are indicated in the dark grey box.

[0126] (FIG. 3B) TCG, TCA and TAG codons are not read by the translational machinery in Syn61Δ3, and codon reassignment enables ncAA incorporation into Ub_{11XXX}. Plasmids encoding the orthogonal MmPyIRS/MmtRNA^{Pyl}_{YYY} pair and a C-terminally His₆-tagged ubiquitin, with a single TCG, TCA, or TAG codon at position 11 (Ub_{11XXX}), or no target codons (wt) were introduced into Syn61Δ3. ‘XXX’ denotes a target codon and ‘YYY’ denotes a cognate anticodon. Expression of ubiquitin-His₆ was performed in the absence (−) or presence (+) of a ncAA substrate for MmPyIRS, Bock. Full-length ubiquitin-His₆ was detected in cell lysate from an equal number of cells with an anti-His₆ antibody.

[0127] (FIG. 3C) Production of ubiquitin-His₆ incorporating Bock, Ub-(11Bock)-His₆, from a Ub_{11XXX} gene bearing the indicated target codon was confirmed by Electrospray ionization mass spectrometry (ESI-MS). Theoretical mass: 9487.7 Da; measured mass: 9487.8 Da (TCG), 9487.8 Da (TCA), 9488.0 (TAG). The peak of 100 Da smaller results from the loss of tert-butoxycarbonyl from Bock. (FIG. 3D) As in FIG. 3B but using Ub_{11XXX,65XXX}, which contains target codons at positions 11 and 65 of the Ub gene.

[0128] (FIG. 3E) Production of ubiquitin-His₆ incorporating Bock at positions 11 and 65, from a Ub_{11XXX65XXX} gene bearing the indicated target codons was confirmed by ESI-MS. Theoretical mass: 9629.0 Da; measured mass: 9629.2 Da (TCG), 9629.0 Da (TCA), 9629.0 Da (TAG). The smaller peak of-100 Da corresponds to loss of tert-butoxycarbonyl from Bock.

[0129] (FIG. 3F) As in FIG. 3B but using Ub_{11XXX,14XXX,65XXX}, which contains target codons at positions 11, 14 and 65 of the Ub gene.

[0130] (FIG. 3G) Production of ubiquitin-His₆ incorporating Bock at positions 11, 14 and 65, from Ub_{11XXX,14XXX,65XXX} bearing the indicated target codons was confirmed by ESI-MS. Theoretical mass: 9756.1 Da; measured mass: 9756.2 Da (TCG), 9756.0 Da (TCA), 9756.0 Da (TAG). The smaller peaks of −100 Da or −200 Da correspond to loss of tert-butoxycarbonyl from one or two Bock residues, respectively.

[0131] (FIG. 3H) As in FIG. 3B but using Ub_{9XXX,11XXX,14XXX,65XXX}, which contains target codons at positions 9, 11, 14 and 65 of the Ub gene.

[0132] (FIG. 3I) Production of ubiquitin-Hiss incorporating Bock at positions 9, 11, 14 and 65, from Ub_{9XXX,11XXX,14XXX,65XXX} bearing the indicated target codons was confirmed by ESI-MS. Theoretical mass: 9883.3 Da; measured mass: 9883.2 Da (TCG), 9883.2 Da (TCA), 9883.2 Da (TAG). The smaller peaks of −100 Da or −200 Da correspond to loss of tert-butoxycarbonyl from one or two Bock residues, respectively. All experiments were performed in biological replicates three times with similar results.

[0133] FIGS. 4A-4E. Double and triple incorporation of distinct non-canonical amino acids into TCG, TCA, and TAG codons in Syn61Δ3 cells.

[0134] (FIG. 4A) Reassignment of TCG (blue box), TCA (gold box) and TAG (green box) codons to distinct ncAAs in Syn61Δ3. Reassigning all three codons to distinct ncAAs in a single cell requires three engineered triply orthogonal aminoacyl-tRNA synthetase/tRNA pairs. Each pair must recognize a distinct ncAA and decode a distinct codon. The tRNAs from these triply orthogonal pairs are labelled O-tRNA¹⁻³.

[0135] (FIG. 4B) The incorporation of two distinct non-canonical amino acids in response to TCG and TAG codons in a single gene. Syn61Δ3(ev4)—containing the 1R26PyIRS(CbzK)/AlvtRNA^{ΔNPyl(8)}_{CGA} pair and the AfTyrRS(p-I-Phe)/AftRNA^{Tyr(A01)}_{CUA} pair (30) (which direct the incorporation of N^{t}-(carbobenzyloxy)-L-lysine (CbzK) into TCG and(S)-2-Amino-3-(4-iodophenyl) propanoic acid (p-I-Ph e) into TAG, respectively)—were provided with CbzK and p-I-Phe. Cells also contained Ub_{11TCG,65TAG} (TCG/TAG) or Ub9_{TCG,11TCG,14TAG,65TAG} (2xTCG/2xTAG), or wt Ub, which contains no target codons. Expression of ubiquitin-His₆ was performed in the absence (−) or presence (+) of the ncAAs. Full-length ubiquitin-His₆ was detected in cell lysate from an equal number of cells with an anti-Hiss antibody.

[0136] (FIG. 4C) ESI-MS analyses of purified Ub-(11CbzK, 65p-I-Phe) (black trace) and Ub-(11CbzK, 14CbzK, 57p-I-Phe, 65p-I-Phe) (grey trace), expressed in the presence of CbzK and p-I-Phe, as described in FIG. 4E and purified by Ni²⁺-NTA chromatography. These data confirm the quantitative incorporation of CbzK and p-I-Phe in response to TCG and TAG codons, respectively. Ub-(11CbzK, 65p-I-Phe), theoretical mass: 9707.81 Da; measured mass: 9707.40 Da. Ub-(11CbzK, 14CbzK, 57p-I-Phe, 65p-I-Phe), theoretical mass: 10055.00 Da; measured mass: 10055.60 Da. (FIG. 4D) The incorporation of three distinct non-canonical amino acids into TCG, TCA and TAG codons in a single gene. Syn61Δ3(ev4)—containing the 1R26PyIRS(CbzK)/AlvtRNA^{ΔNPyl(8)}_{CGA} pair, the MmPyIRS/MmtRNA^{Pyl}_{UGA} pair and the AfTyrRS(p-I-Phe)/AftRNA^{Tyr(A01)}_{CUA} pair—were provided with CbzK, Bock and p-I-Phe. Cells also contained Ub_{9TAG,11TCG,14TCA} (TCG/TCA/TAG). Expression of this gene was performed in the absence (−) or presence (+) of the ncAAs. Full-length Ub-(9p-I-Phe, 11CbzK, 14Bock)-His₆ was detected in cell lysate from an equal number of cells with an anti-His₆ antibody.

[0137] (FIG. 4E) ESI-MS of purified Ub-(9p-I-Phe, 11CbzK, 14Bock), theoretical mass: 9820.97 Da; measured mass: 9820.80 Da. Western blot experiments (FIGS. 4B and 4D) were performed in 5 biological replicates with similar results. The ESI-MS data (FIGS. 4C and 4E) was collected once.

[0138] FIGS. 5A-5J. Programmable, encoded synthesis of non-canonical heteropolymers and macrocycles

[0139] (FIG. 5A) Elementary steps in the ribosomal polymerization of two distinct ncAA monomers (labelled A (dark blue) and B (green)). All linear heteropolymer sequences composed of A and B can be encoded from these four elementary steps.

[0140] (FIG. 5B) Encoding heteropolymer sequences (non-canonical monomers are shown as stars). The sequence of monomers in the heteropolymer is programmed by the sequence of codons written by the user. The identity of monomers (A and B) is defined by the aminoacyl-tRNA synthetase/tRNA pairs added to the cell. Cells can be reprogrammed to encode different heteropolymer sequences from a single DNA sequence. Sequences were encoded as insertions at position 3 of sfGFP-His6. Reassignment scheme 1 (r.s.1) uses the MmPyIRS/MmtRNA^{Pyl}_{CGA} pair to assign Allock as monomer A and the 1R26PyIRS(CbzK)/AlvtRNA^{ΔNPyl(8)}_{CUA} pair to assign CbzK as monomer B (FIGS. 12D and 12E). r.s.2 uses the MmPyIRS/MmtRNA^{Pyl}_{CGA} pair to assign Bock as monomer A and an AfTyrRS(p-I-Phe)/AftRNA^{Tyr(A01)}_{CUA} pair to assign p-I-Phe as monomer B. r.s.3 uses the 1R26PyIRS(CbzK)/AlvtRNA^{ΔNPyl(8)}_{CGA} pair to assign CbzK as monomer A and the AfTyrRS(p-I-Phe)/AftRNA^{Tyr(A01)}_{CUA} pair to assign p-I-Phe as monomer B.

[0141] (FIGS. 5C-5E) Polymerization of the encoded sequence composed of the indicated ncAAs, and the resulting sfGFP-His6 expression in Syn61Δ3(ev5) were dependent on the addition of both ncAAs to the medium.

[0142] (FIG. 5F) Electrospray ionization (ESI) MS of purified sfGFP-His6 variants containing the indicated ncAA hexamers. Bock/p-I-Phe (expected mass after loss of N-terminal methionine: 29172.07 Da; observed: 29171.8 Da), CbzK/p-I-Phe (expected mass after loss of N-terminal methionine: 29274.13 Da; observed: 29274.0 Da) and AllocK/CbzK (expected mass after loss of N-terminal methionine: 29091.64 Da; observed: 29092.2 Da). The ESI-MS data was collected once.

[0143] (FIG. 5G) Encoded synthesis of free non-canonical polymers. DNA sequences encoding a tetramer and a hexamer were inserted between SUMO and a GyrA intein coupled to a chitin-binding domain (CBD), in Syn61Δ3(ev5) cells containing the same pairs as in r.s.1 (FIG. 5B). Expression of the constructs, followed by Ulp1 cleavage and GyrA trans-thioesterification cleavage, results in the isolation of free non-canonical tetramer and hexamer polymers. Adding an additional cysteine immediately upstream of the polymer sequence results in self-cleavage and release of a macrocyclic non-canonical polymer.

[0144] (FIGS. 5H-5J) Chemical structures and ESI-MS spectra of the purified linear and cyclic AllocK/CbzK heteropolymers. The raw ESI-MS spectra show the relative intensity and observed m/z ratios for the different non-canonical peptides. The observed masses corresponding to the expected [M+H]⁺ or [M+2H]²⁺ ions are highlighted in bold. Other adducts and fragment ions are labelled relative to these.

[0145] FIGS. 6A-61. Syn61 strain evolution and knockouts.

[0146] (FIG. 6A) Schematic of automated parallel evolution. Clonal cultures are shown in pale yellow; mutagenized populations in each well are represented by distinct shades. Mutator cultures were grown for 17-70 generations with induced random mutagenesis followed by six cycles of dynamic parallel selection on a robotics platform. Regular assessment of optical density (OD₆₀₀) and re-dilution of all wells when 3 wells reach an OD₆₀₀ of 0.5 enables continuous growth in exponential phase for approximately 52 generations. Finally, single colonies are isolated from mutagenized populations and characterized by growth measurement and whole genome sequencing. Figure adapted from Schmied et al. (17) with permission.

[0147] (FIG. 6B) Lineage of Syn61 and Syn61Δ3 descendants isolated from evolved pools. Colored blocks represent individual clones isolated from independently evolved pools after each round, underlined clones were selected for subsequent rounds of evolution. Grey blocks represent clones that were characterized by growth, with some sequenced (C02.6, C04.7, A11.3, E7.2) but not considered for further ORF mutation analysis in FIGS. 7A-7E. A list with all mutations identified in sequencing analyses of the evolved strains is provided in Data file S1. The 16 additional clones not indicated for round 1 with Syn61Δ3 are G5.2, F8.2, A11.1, F11.3, E10.1, F11.10, F5.2, G8.1, D1.2, D11.1, F11.8, F11.2, D8.4, A9.1, F8.1, F11.6.

[0148] (FIG. 6C) Schematic of strain development from Syn61 to Syn61Δ3(ev5). The codons that encode serine and protein termination are connected to the anticodons of the tRNAs or release factors predicted to decode them by black lines; all sequences are written 5′ to 3′. The genes encoding the corresponding tRNAs and release factors are indicated in the black boxes. The inventors performed automated parallel mutagenesis and dynamic selection to create a faster growing version of Syn61, Syn61(ev1). This strain was then further evolved to Syn61(ev2). Mutations gained in each strain are separated as mutations in open reading frames (ORFs), non-coding mutations and mutations in intergenic regions. For a detailed list of all mutations gained in the strain development see Data file S1. Targeted deletion of serT, serU, and prfA created Syn61Δ3. In this process the inventors observed rearrangements at 2 loci: i) the collapse of a CRISPR array leading to a 429 bp deletion and ii) the partial replacement of ribosomal operon rrnC with a duplicated segment from the highly homologous ribosomal operon rrnB. The corresponding changes relative to wt Syn61 amount to 19 mutations. After three more subsequent rounds of evolution, the inventors isolated Syn61Δ3(ev3), Syn61Δ3(ev4), and Syn61Δ3(ev5), respectively.

[0149] (FIG. 6D) Growth rates of four clones isolated with increased growth rate after one round of Syn61 evolution with mutagenesis for ˜17 generations. Two out of 96 parallel evolved pools (C02 and C04) yielded clones with improved growth. Sequences of clones derived from the same pool (C02.5 and C02.7 or C04.7 and C04.4) were nearly identical, thus they were considered clonal. Open reading frames with more than one mutation are listed in FIGS. 7A-7E. Growth rates were calculated for n=8 replicate cultures for each strain. For statistics, see Methods.

[0150] (FIG. 6E) Growth rates of three clones isolated with increased growth rate after the second round of Syn61 evolution, starting with mutagenesis of C04.4 (Syn61(ev1)) for ˜17 generations. Two out of 96 parallel evolved pools (E10 and A11) yielded clones with improved growth. Growth rates were calculated for n=8 replicate cultures for each strain. For statistics, see Methods.

[0151] (FIG. 6F) Growth rates of 22 clones isolated with increased growth rate after one round of Syn61Δ3 evolution with mutagenesis for ˜70 generations, derived from 11 independent pools. Growth rates were calculated for n=5 replicates or n=1 (denoted with red asterisk) cultures for each strain. For statistics, see Methods.

[0152] (FIG. 6G) Growth rates of 7 clones isolated from independent pools with increased growth rate after the second round of Syn61Δ3 evolution, starting with mutagenesis of F11.9 (Syn61Δ3(ev3)) for ˜45 generations. Growth rates were calculated for n=6 replicate cultures for each strain. For statistics, see Methods.

[0153] (FIG. 6H) Growth rates of 5 clones isolated from independent pools with increased growth rate after the third round of Syn61Δ3 evolution, starting with mutagenesis of E7.4 (Syn61Δ3(ev4)) for ˜60 generations. Growth rates were calculated for n=6 replicate cultures for each strain. For statistics, see Methods.

[0154] (FIG. 6I) The doubling time of the most evolved Syn61 derivative (Syn61Δ3(ev5)) was calculated from growth curves recorded under standard laboratory conditions. Three independent cultures were grown in shake flasks at 37° C. and OD₆₀₀ measurements were taken every 10 minutes during exponential growth. For each independent culture a 60 min window during exponential phase was chosen to calculate an average growth rate of 0.026±5·10⁻⁴ and a doubling time of 38.72±1.02 min for Syn61Δ3(ev5). For statistics, see Methods.

[0155] FIGS. 7A-7E. Open reading frames mutated more than once during Syn61 evolution.

[0156] (FIG. 7A) For this analysis the inventors selected 14 clones, one sequenced clone from each pool, denoted with colored blocks in FIG. 6B. The inventors identified open reading frames mutated more than once, between Syn61 and Syn61Δ3, in a single strain or evolutionarily related strains. Mutations arising in a single strain or in strains related through evolutionary history may not be independent. For example, a detrimental frameshift mutation introduced in nrdE in E10.4 may mean that additional mutations in nrdE are not selected for or against, as the gene is already inactivated. The inventors observed that on average 2*10⁻⁶ mutations per bp per generation were introduced with induced random mutagenesis. On average we accumulated 87.25 mutations in ORFs within the genome per round of mutagenesis and selection. If each mutation is assumed to be independent, then the probability of finding at least two mutation in the same open reading frame (given 3556 ORFs in E. coli) is 0.65. Therefore, it is not unlikely that these mutations are found in the same ORF by chance. Our data are consistent with their being a wide variety of ways for a recoded strain to improve its fitness. Red asterisks denote detrimental mutations, including premature stop codons and frameshifts due to insertion or deletion of typically 1 bp. Red boxes mark essential genes, green boxes in FIGS. 7A and 7B mark genes affected with one additional mutation during post-knockout evolution. A list with all mutations identified in sequencing analyses of the evolved strains is provided in Data file S1.

[0157] (FIG. 7B) Open reading frames mutated more than once, between Syn61 and Syn61Δ3, in independently derived strains. rrmJ, a 23S rRNA methyltransferase, gained two nonsense mutations during initial evolution of Syn61 within 40 bp of each other (P190L, V203A), in close proximity to a Syn61 recoding event (S197). On average we accumulated 87.25 mutations in ORFs within the genome per round of mutagenesis and selection. If each mutation is assumed to be independent, then the probability of finding at least two mutation in the same open reading frame (given 3556 ORFs in Syn61) is 0.65. Therefore, it is not unlikely that these mutations are found in the same ORF by chance. Overall, there was minimal overlap between the mutations arising in independently evolved strains. Our data are consistent with their being a wide variety of ways for a recoded strain to improve its fitness.

[0158] (FIG. 7C) Open reading frames mutated more than once between Syn61Δ3 and Syn61Δ3(ev5) in a single strain or related strains. parE, an essential gene involved in chromosome segregation, accumulated the overall highest number of mutations. Green boxes in FIGS. 7C-7E mark genes affected with one additional mutation in a strain derived during Syn61 evolution before knockout of the decoding elements. On average we accumulated 62.3 mutations in ORFs within the genome per round of mutagenesis and selection. If it is assumed that each mutation is independent, then the probability of finding at least two mutation in the same open reading frame (given 3556 ORFs in Syn61) is 0.41. Therefore, it is not unlikely that these mutations are found in the same ORF by chance. Overall, there was minimal overlap between the mutations arising in independently evolved strains. These data are consistent with their being a wide variety of ways for a recoded strain to improve its fitness.

[0159] (FIG. 7D) Open reading frames mutated more than once between Syn61Δ3 and Syn61Δ3(ev5) in independently derived strains within the same evolution round. ORFs affected within the same evolution round in independently evolved strains may indicate a strong evolutionary pressure on the predecessor. Four identical mutations were recorded in topA in all strains derived after round 2. The inventors suspect that the 1 bp deletion occurred after sequencing F11.9 before splitting the strain into separate mutagenesis pools. sbcD and nuoG are the most affected by independent mutations in the initial evolution of Syn61Δ3. Overall, there was minimal overlap between the mutations arising in independently evolved strains, indicating a wide variety of ways for a recoded strain to improve its fitness. On average we accumulated 62.3 mutations in ORFs within the genome per round of mutagenesis and selection. If it is assumed that each mutation is independent, then the probability of finding at least two mutation in the same open reading frame (given 3556 ORFs in Syn61) is 0.41. Therefore, it is not unlikely that these mutations are found in the same ORF by chance. Overall, there was minimal overlap between the mutations arising in independently evolved strains. These data are consistent with their being a wide variety of ways for a recoded strain to improve its fitness.

[0160] (FIG. 7E) Open reading frames mutated more than once between Syn61Δ3 and Syn61Δ3(ev5) in independently derived strains in separate evolution rounds. No more than two mutations emerged independently across rounds of Syn61Δ3 evolution. On average we accumulated 62.3 mutations in ORFs within the genome per round of mutagenesis and selection. If it is assumed that each mutation is independent, then the probability of finding at least two mutation in the same open reading frame (given 3556 ORFs in Syn61) is 0.41. Therefore, it is not unlikely that these mutations are found in the same ORF by chance. Overall, there was minimal overlap between the mutations arising in independently evolved strains. These data are consistent with their being a wide variety of ways for a recoded strain to improve its fitness.

[0161] FIGS. 8A-8E. Phage propagation is ablated in Syn61Δ3.

[0162] (FIG. 8A) Relative total phage titer after 4 hours of infection of Syn61 variants (see FIG. 2C). The titer of free and intracellular phage resulting from infection was determined by isolating phage from the cultures, serially diluting the isolate, and using it to infect E. coli MG1655 on plates. Cultures of Syn61Δ3 and gentamycin-treated Syn61(ev2), in which protein synthesis, and therefore phage production, is inhibited, contain the same amount of phage after 4 hours, while Syn61(ev2) and Syn61ΔRF-1 propagate the phage and lead to infection. The shown plates are the indicated dilutions.

[0163] (FIG. 8B) Protein synthesis is ablated in gentamycin-treated cells. A Syn61(ev2) control and Syn61(ev2) treated with gentamycin were grown with ³⁵S-Met/Cys and labeled proteins were visualised by SDS-PAGE and phosphorimaging. Despite exposing the phosphor screen for two weeks, no signal was observed for the gentamycin-treated sample.

[0164] (FIG. 8C) Total titer of T7 phage upon infecting Syn61 and its derivatives. Cultures were infected with phage at MOI=5·10⁻⁵ (multiplicity of infection) and the total titer was monitored over 4 hours. (FIG. 8D) T7 efficiently lyses Syn61 variants but not Syn61Δ3. Cultures were infected as in FIG. 8C and OD₆₀₀ was measured after 4 hours.

[0165] (FIG. 8E) Schematic of the TCG, TCA, and TAG codon density in the genomes of phage λ, P1, T4, and T7, as in FIG. 2B.

[0166] FIGS. 9A-9G. MS-MS spectra confirm site-specific non-canonical amino acid (ncAA) incorporation into reporters containing one, two, three or four TCG codons in Syn61Δ3.

[0167] (FIG. 9A) Ub_{11TCG} reporter containing Bock at position 11 (Ub-(11Bock)) (see FIGS. 3B and 3C) was purified by Ni²⁺-NTA and subject to trypsin digestion followed by LC/MS-MS analysis (see Methods for full details). The tryptic peptides confirm the site-specific incorporation of Bock into the TCG codon at position 11.

[0168] (FIGS. 9B and 9C) LC/MS-MS analysis of Ub-(11Bock, 65BocK) (see FIGS. 3D and 3E), as in FIG. 9A. The tryptic peptides confirm the site-specific incorporation of Bock into TCG codons at positions 11 (FIG. 9B) and 65 (FIG. 9C).

[0169] (FIGS. 9D and 9E) LC/MS-MS analysis of Ub-(11Bock, 14Bock, 65Bock) (see FIGS. 3F and 3G), as in FIG. 9A. The tryptic peptides confirm the site-specific incorporation of Bock into TCG codons at positions 11, 14 (FIG. 9D) and 65 (FIG. 9E).

[0170] (FIGS. 9F and 9G) LC/MS-MS analysis of Ub-(9Bock, 11Bock, 14Bock, 65Bock) (see FIGS. 3H and 3I), as in FIG. 9A. The tryptic peptide containing residues 9, 11, and 14 (FIG. 9F) was found with the correct parent ion mass which harboured three Bock masses. The fragmentation pattern of this parent ion confirmed the site-specific incorporation of BocK into TCG codons at positions 11 and 14, though there were not enough b- and y-series ions to localize Bock to position 9. (FIG. 9G) The tryptic peptide confirming the site-specific incorporation of Bock into the TCG codon at position 65.

[0171] FIG. 10. GST-MBP comparison of sense codon and amber codon suppression in Syn61Δ3(ev5).

[0172] Syn61Δ3(ev5) cells harbouring an orthogonal aaRS/tRNA pair and its corresponding ncAA efficiently generate full-length GST-MBP protein in response to a sense codon or amber codon. The inventors co-transformed Syn61Δ3(ev5) cells or MDS42 cells (control) with a plasmid encoding the orthogonal MmPyIRS/MmtRNA^{Pyl}_{YYY} pair and a plasmid encoding the cognate GST-XXX-MBP reporter; XXX encodes either a wildtype (wt) codon, a TCG sense codon, or a TAG stop codon, and YYY denotes its cognate anticodon. Following induction for GST-XXX-MBP expression in the absence (−) or presence (+) of Bock (5 mM), expressed protein was pulled down with glutathione sepharose beads. Bound samples were then eluted with reduced glutathione and the resultant full-length GST-MBP or truncated GST products analyzed by SDS-PAGE. For both the TCG sense codon and TAG stop codon in Syn61Δ3(ev5) cells, efficient GST-MBP full-length synthesis was detected only in the presence of BocK (see Data file S4 for yields).

[0173] FIGS. 11A and 11B. Syn61Δ3(ev4) enables reassignment of nine sense codons to a non-canonical amino acid (ncAA) in an elastin-like polypeptide (ELP).

[0174] (FIG. 11A) Syn61Δ3(ev4) enables multi-site ncAA incorporation into the 9 TCG codons in ELP_{9x(TCG)}. The inventors co-transformed a plasmid encoding the orthogonal MmPyIRS/MmtRNA^{Pyl}_{CGA} pair and a plasmid encoding ELP_{9x(TCG)}; this contains nine repeats of the ELP coding sequence, with each repeat containing a TCG codon, and a His₆-tag is encoded at the 3′ end. Each ELP repeat of ‘VPGVGVPGVGVPGXGVPGVGVPGVG’ (SEQ ID NO: 1). The sequence of the plasmid is GenBank accession MW879732, and provided herein as SEQ ID NO: 2) contains 24 canonical amino acids and one ncAA residue (X). In cells transformed with the MmPyIRS/MmtRNA^{Pyl}_{CGA} plasmid, ELP_{9x(TCG)} expression was induced in the absence (−) or presence (+) of Bock. The inventors then used an anti-His₆ antibody to monitor for full-length protein (ELP_{9x(Bock)}) production from normalized cell lysates-efficient ELP_{9x(Bock)} synthesis was detected only in the presence of both arabinose (Ara) and Bock. As a comparison for the efficiency of the orthogonal aaRS/tRNA pair, cells were separately transformed with a plasmid encoding EctRNA^{Ala}_{CGA}, a chimeric alanyl tRNA with a CGA anticodon which directs alanine incorporation in response to TCG codons, from which the inventors detected efficient ELP_{9x(Ala)} synthesis in the presence of arabinose (Ara). Western blots were performed in biological replicates three times with similar results. (FIG. 11B) ESI-MS of Ni²⁺-NTA purified ELP_{9x(Bock)}-His₆ from the experiment described in FIG. 11A confirms the incorporation of Bock into 9 TCG codons. Theoretical mass: 23222.32 Da; measured mass: 23221.80 Da. ESI-MS data was collected once.

[0175] FIGS. 12A-12E. Mutual orthogonality of the aaRS/tRNA pairs used for double and triple noncanonical amino acid incorporations.

[0176] (FIGS. 12A-12C) The aaRs/tRNA pairs used for double and triple distinct non-canonical amino acid incorporations in FIGS. 4A-4E and FIGS. 5A-5J are mutually orthogonal. Syn61Δ3(ev4)—containing the 1R26PyIRS(CbzK)/AlvtRNA^{ΔNPyl(8)}_{CGA} pair, the MmPyIRS/MmtRNA^{Pyl}_{UGA} pair and the AfTyrRS(p-I-Phe)/AftRNA^{Tyr(A01)}_{CUA} pair (which direct the incorporation of CbzK into TCG, Bock into TCA and p-I-Phe into TAG, respectively)—was provided with CbzK, Bock and p-IPhe. Cells also contained GFP_{3TCG} (FIG. 12A), GFP_{3TCA} (FIG. 12B). or GFP_{3TAG} (FIG. 12C). Electrospray ionization (ESI) MS analysis of GFP-His₆ purified from cells containing GFP_{3TCG} incorporated CbzK, but not Bock or p-I-Phe. GFP_{3TCA} led to the incorporation of Bock, and GFP_{3TAG} led to incorporation of p-I-Phe.

[0177] (FIGS. 12D and 12E) The MmPyIRS/MmtRNA^{Pyl}_{CGA} and 1R26PyIRS(CbzK)/AlvtRNA^{ΔNPyl(8)}_{CUA} pairs incorporate distinct ncAAs in response to distinct codons in Syn61Δ3(ev4). The orthogonal aaRS/tRNA pairs MmPyIRS/MmtRNA^{Pyl}_{CGA} and 1R26PyIRS(CbzK)/AlvtRNA^{ΔNPyl(8)}_{CUA} each incorporate their distinct, cognate ncAA in response to their distinct, cognate codons. In the presence of both MmPyIRS/MmtRNA^{Pyl}_{CGA} and 1R26PyIRS(CbzK)/AlvtRNA^{ΔNPyl(8)}_{CUA} in Syn61Δ3(ev4) cells harbouring a GFP_{3XXX} reporter plasmid, the inventors expressed GFP in the presence of both AllocK and CbzK (+/+). (FIG. 12D) ESI-MS of Ni²⁺-NTA purified GFP_{3TCG} yielded a mass corresponding to the incorporation of Allock, and not CbzK, thus demonstrating the orthogonality of MmPyIRS/MmtRNA^{Pyl}_{CGA} for its cognate ncAA and cognate codon. (FIG. 12E) ESIMS of Ni²⁺-NTA purified GFP_{3TAG} yielded a mass corresponding to the incorporation of CbzK, and not Allock, thus demonstrating the orthogonality of the 1R26PyIRS(CbzK)/AlvtRNA^{ΔNPyl(8)}_{CUA} pair for its cognate ncAA and cognate codon.

[0178] FIGS. 13A-13F. MS-MS spectra confirm the site-specific incorporation of distinct non-canonical amino acids (ncAAs) into double, double-double, and triple ubiquitin reporters in Syn61Δ3(ev4).

[0179] (FIGS. 13A and 13B) Ub-(11CbzK, 65p-I-Phe) double (see FIG. 4B), Ub-(11CbzK, 14CbzK, 57p-I-Phe, 65p-IPhe) double-double (see FIG. 4B), and Ub-(9p-I-Phe, 11CbzK, 14BocK) triple (see FIG. 4D) ncAA incorporations were purified by Ni²⁺-NTA and subjected to LC-MS/MS analyses following trypsin digestion to confirm the site-specific incorporation of distinct ncAAs into distinct sense and stop codons (see Methods for full details). For double distinct ncAA incorporation into the double Ub_{11TCG,65TAG} gene, the purified protein Ub-(11CbzK, 65p-I-Phe) yielded tryptic peptides corresponding to the site-specific incorporation of CbzK into the 11TCG codon (FIG. 13A) and p-I-Phe into the 65TAG codon (FIG. 13B).

[0180] (FIGS. 13C-13E) For double-double distinct ncAA incorporation into the Ub_{11TCG,14TCG,57TAG,65TAG} gene, the purified protein Ub-(11CbzK, 14CbzK, 57p-I-Phe, 65p-I-Phe) yielded tryptic peptides corresponding to the site-specific incorporation of CbzK into the 11TCG and 14TCG codons (FIG. 13C) as well as p-I-Phe into the 57TAG (FIG. 13D) and 65TAG codons (FIG. 13E).

[0181] (FIG. 13F) For triple distinct ncAA incorporation into the Ub_{9TAG,11TCG,14TCA} gene, the purified protein Ub-(9p-I-Phe, 11CbzK, 14Bock) yielded tryptic peptides corresponding to the site-specific incorporation of p-I-Phe into the 9TAG codon, CbzK into the 11TCG codon, and Bock into the 14TCA codon.

[0182] FIGS. 14A-14C. Multiple examples of encoding three distinct non-canonical amino acids into a single protein in Syn61Δ3(ev4).

[0183] (FIG. 14A) Chemical structures of the 8 non-canonical amino acids (ncAAs) used to demonstrate codon reassignment and triple ncAA incorporations in Syn61. The numbers indicate the identity of the ncAAs provided in FIG. 14B.

[0184] (FIG. 14B) Seven examples of encoding three distinct ncAAs into a single protein in Syn61Δ3(ev4). Cells were transformed with plasmids encoding a His₆-tagged Ub_{9TAG,11TCG,14TCA} (or wt Ub) reporter plus three mutually orthogonal aaRS/tRNA pairs, and expression of the reporter was induced by addition of L-arabinose in the absence (−) or presence (+) of ncAAs. Full-length reporter expression was detected from an equal number of cells, normalized by OD₆₀₀ spectrophotometric measurements, by western blot with an anti-His₆ antibody. For expression of wt Ub and incorporation of CbzK, p-I-Phe and Bock/AllocK/CypK/AlkK (lanes 1-6), cells contained pairs 1R26PyIRS (CbzK)/AlvtRNA^{ΔNPyl(8)}_{CGA}, AfTyrRS(p-I-Phe)/AftRNA^{Tyr(A01)}_{CUA} and MmPyIRS/MmtRNA^{Pyl}_{UGA}. For incorporation of Allock, 3-Nitro-Tyr and CbzK (lanes 7 and 8), cells contained pairs MmPyIRS/MmtRNA^{Pyl}_{CGA}, MjTyrRS (3-Nitro-Tyr)/MjtRNA^{Tyr}_{CUA} (from ref (39)) and 1R26PyIRS (CbzK)/AlvtRNA^{ΔNPyl(8)}_{UGA}. For incorporation of p-Az-Phe, CbzK and AllocK/AlkK (lanes 9-11), cells contained pairs MmPyIRS/MmtRNA^{Pyl}_{CGA}, MjTyrRS (p-Az-Phe)/MjtRNA^{Tyr}_{CUA} (from ref (40)) and 1R26PyIRS (CbzK)/AlvtRNA^{ΔNPyl(8)}_{UGA}. In all cases, expression of Ub_{9TAG,11TCG,14TCA} was dependent on provision of the three cognate ncAAs.

[0185] (FIG. 14C) The inventors purified Ub-Hiss reporters with Ni²⁺-NTA beads in Syn61Δ3(ev4) (see Methods) and performed ESI-MS analyses of the 7 different combinations of unnatural amino acids detailed in FIG. 14B. Each trace corresponds to a different ubiquitin species, bearing the designated ncAAs at the positions indicated by the numbers. Ub(9p-I-Phe, 11CbzK, 14Bock) theoretical mass: 9820.97 Da; observed mass: 9820.8 Da—the −100 Da peak corresponds to loss of the tertbutoxycarbonyl in Bock. Ub(9p-I-Phe, 11CbzK, 14AllocK) theoretical mass: 9804.94 Da; observed mass: 9805.0 Da. Ub(9p-I-Phe, 11CbzK, 14CypK) theoretical mass: 9830.97 Da; observed mass: 9830.8 Da. Ub(9p-I-Phe, 11CbzK, 14AlkK) theoretical mass: 9802.88 Da; observed mass: 9803.0 Da. Ub(9 (3-Nitro-Tyr), 11AllocK, 14CbzK) theoretical mass: 9740.09 Da; observed mass: 9740.0 Da. Ub(9p-Az-Phe, 11Allock, 14CbzK) theoretical mass: 9720.09 Da; observed mass: 9720.2 Da. Ub(9p-Az-Phe, 11AlkK, 14CbzK) theoretical mass: 9717.99 Da; observed mass: 9718.6 Da. The ESI-MS data was collected once. See FIGS. 15A-15F for further confirmation of triple ncAA incorporation in response to the target codons. See Data file S4 for yields.

[0186] FIGS. 15A-15F. MS-MS spectra from six additional triple distinct non-canonical amino acid (ncAA) combinations confirm the site-specific incorporation of the intended three ncAAs into Ub_{9TAG,11TCG,14TCA} reporters.

[0187] (FIG. 15A) To encode three distinct ncAA incorporations into the Ub_{9TAG,11TCG,14TCA} gene, the inventors expressed three orthogonal aaRS/tRNA pairs and added the corresponding three ncAAs to Syn61Δ3(ev4) cells. Ubiquitin containing ncAAs was purified by Ni²⁺-NTA and subjected to LC/MS-MS analyses following trypsin digestion to confirm the site-specific incorporation of distinct ncAAs into distinct TCG, TCA, and TAG codons (see Methods for full details). To encode the triple ncAA combination of p-I-Phe, CbzK, and Allock in response to TAG, TCG, and TCA codons, respectively, the same aaRS/tRNA pairs were used as in FIG. 4D. The purified protein Ub-(9p-IPhe, 11CbzK, 14AllocK) yielded tryptic peptides corresponding to the site-specific incorporation of p-I-Phe into the 9TAG codon, CbzK into the 11TCG codon, and AllocK into the 14TCA codon.

[0188] (FIG. 15B) For the triple ncAA combination incorporating p-I-Phe, CbzK, and CypK in response to the TAG, TCG, and TCA codons, respectively, the same aaRS/tRNA pairs were used as in FIG. 4D. The purified protein Ub-(9p-I-Phe, 11CbzK, 14CypK) yielded a tryptic peptide with the correct parent ion mass containing residues 9 (p-I-Phe), 11 (CbzK), and 14 (CypK). The fragmentation pattern of this parent ion confirmed the site-specific incorporation of CbzK into the 11TCG codon and CypK into the 14TCA codon, though there were not enough b- and y-series ions to localize p-I-Phe to position 9.

[0189] (FIG. 15C) For the triple ncAA combination incorporating p-I-Phe, CbzK, and AlkK in response to the TAG, TCG, and TCA codons, respectively, the same aaRS/tRNA pairs were used as in FIG. 4D. The purified protein Ub-(9p-I-Phe, 11CbzK, 14AlkK) yielded tryptic peptides corresponding to the site-specific incorporation of p-I-Phe into the 9TAG codon, CbzK into the 11TCG codon, and AlkK into the 14TCA codon.

[0190] (FIG. 15D) For the triple ncAA combination incorporating 3-Nitro-Tyr, Allock, and CbzK in response to the TAG, TCG, and TCA codons, respectively, the inventors used the orthogonal aaRS/tRNA pairs MmPyIRS/MmtRNA^{Pyl}_{CGA}, MjTyrRS(3-Nitro-Tyr)/MjtRNA^{Tyr}_{CUA} (from ref (39)), and 1R26PyIRS (CbzK)/AlvtRNA^{ΔNPyl(8)}_{UGA}. The purified protein Ub-(9 (3-Nitro-Tyr), 11Allock, 14CbzK) yielded tryptic peptides corresponding to the site-specific incorporation of 3-Nitro-Tyr into the 9TAG codon, AllocK into the 11TCG codon, and CbzK into the 14TCA codon.

[0191] (FIG. 15E) For the triple ncAA combination incorporating p-Az-Phe, Allock, and CbzK in response to the TAG, TCG, and TCA codons, respectively, the inventors used the orthogonal aaRS/tRNA pairs MmPyIRS/MmtRNA^{Pyl}_{CGA}, MjTyrRS(p-Az-Phe)/MjtRNA^{Tyr}_{CUA} (from ref (40)), and 1R26PyIRS (CbzK)/AlvtRNA^{ΔNPyl(8)}_{UGA}. The purified protein Ub-(9p-Az-Phe, 11Allock, 14CbzK) yielded tryptic peptides corresponding to the site-specific incorporation of p-Az-Phe into the 9TAG codon, AllocK into the 11TCG codon, and CbzK into the 14TCA codon.

[0192] (FIG. 15F) For the triple ncAA combination incorporating p-Az-Phe, AlkK, and CbzK in response to the TAG, TCG, and TCA codons, respectively, the same orthogonal aaRS/tRNA pairs were used as in FIG. 15E. The purified protein Ub-(9p-Az-Phe, 11Allock, 14CbzK) yielded tryptic peptides corresponding to the site-specific incorporation of p-Az-Phe into the 9TAG codon, AlkK into the 11TCG codon, and CbzK into the 14TCA codon.

[0193] FIGS. 16A-16G. Encoded cellular synthesis of non-canonical elementary steps and heterotetramers.

[0194] (FIG. 16A) Elementary steps required for the synthesis of heteropolymer sequences made of Bock and p-I-Phe, encoded as insertions at position 3 of GFP. Bock (monomer A) and p-I-Phe (monomer B) are directed to TCG and TAG codons respectively, using pairs MmPyIRS/MmtRNA^{Pyl}_{CGA} and AfTyrRS (p-I-Phe)/AftRNA^{Tyr(A01)}_{CUA} as in reassignment scheme 2 (r.s.2) in FIG. 5B. Polymerization and sfGFP expression were dependent on the addition of ncAAs to the medium.

[0195] (FIG. 16B) Encoding elementary steps made of CbzK and p-I-Phe, directed to TCG and TAG respectively using pairs 1R26PyIRS(CbzK)/AlVERNA^{ΔNPyl(8)}_{CGA} and AfTyrRS(p-I-Phe)/AftRNA^{Tyr(A01)}_{CUA} as in reassignment scheme 3 (r.s.3) in FIG. 5B.

[0196] (FIG. 16C) Encoding elementary steps made of AllocK and CbzK, directed to TCG and TAG respectively using pairs MmPyIRS/MmtRNA^{Pyl}_{CGA} and 1R26PyIRS(CbzK)/AlvtRNA^{ΔNPyl(8)}_{CUA} as in reassignment scheme 1 (r.s.1) in FIG. 5B.

[0197] (FIG. 16D) Schematic of genetic encoding of heterotetramer sequences with TCG and TAG codons, as in FIGS. 5A-5J.

[0198] (FIG. 16E) Encoding tetramers made of Bock and p-I-Phe, directed to TCG and TAG respectively using pairs MmPyIRS/MmtRNA^{Pyl}_{CGA} and AfTyrRS(p-I-Phe)/AftRNA^{Tyr(A01)}_{CUA} as in reassignment scheme 2 (r.s.2) in FIG. 5B.

[0199] (FIG. 16F) Encoding tetramers made of CbzK and p-I-Phe, directed to TCG and TAG respectively using pairs 1R26PyIRS(CbzK)/AlvtRNA^{ΔNPyl(8)}_{CGA} and AfTyrRS(p-I-Phe)/AftRNA^{Tyr(A01)}_{CUA} as in reassignment scheme 3 (r.s.3) in FIG. 5B.

[0200] (FIG. 16G) Encoding tetramers made of AllocK and CbzK, directed to TCG and TAG respectively using pairs MmPyIRS/MmtRNA^{Pyl}_{CGA} and 1R26PyIRS(CbzK)/AlvtRNA^{ΔNPyl(8)}_{CUA} as in reassignment scheme 1 (r.s.1) in FIG. 5B.

[0201] FIGS. 17A-17C. Encoded cellular synthesis of a non-canonical heterooctamer.

[0202] (FIG. 17A) Encoding a heterooctamer made of AllocK and CbzK, directed to TCG and TAG respectively using pairs MmPyIRS/MmtRNA^{Pyl}_{CGA} and 1R26PyIRS(CbzK)/AlvtRNA^{ΔNPyl(8)}_{CUA} as in reassignment scheme 1 (r.s.1) in FIG. 5B, synthesized as an insertion at position 3 of sfGFP.

[0203] (FIG. 17B) Polymerization of the encoded sequence composed of Allock and CbzK, and the resulting sfGFP-His6 expression were dependent on the addition of both ncAAs to the medium.

[0204] (FIG. 17C) Electrospray ionization (ESI) MS of purified sfGFP-(3AllocK, 4CbzK, 5AllocK, 6CbzK, 7Allock, 8CbzK, 9Allock, 10CbzK) containing the indicated set of eight contiguous ncAAs. Expected mass after loss of N-terminal methionine and acetylation: 29608.28 Da; observed mass: 29607.60 Da. The ESI-MS data was collected twice.

[0205] FIG. 18. Excision of linear and cyclic non-canonical heteropolymers.

[0206] The heteropolymer is encoded and expressed in between His₆-SUMO and a GyrA intein (41)-CBD fusion, and the addition of cysteine after SUMO enables self-cyclisation. In a single step, the peptide is excised or cyclized through addition of Ulp1 and DTT. The Ulp1 rapidly removes the N-terminal SUMO, while the C-terminal GyrA intein is cleaved through transthioesterification by DTT or the N-terminal cysteine. The liberated heteropolymers can be purified from the reaction on a C18 column or, if insoluble, can be separated by centrifugation and extracted with hot, acidic methanol. The cyclisation is irreversible through the formation of a peptide bond by an N→S acyl shift, while the DTT thioester hydrolyses.

[0207] FIG. 19. RF1-mediated (ΔRF1) resistance against lambda phage is reversed upon KO of ssrA. On the contrary, lambda phage resistance in triple knockout (43) cells is not reduced by AssrA.

[0208] FIGS. 20A and 20B. Provides a sequence alignment of various aaRS. “*” indicates residues found in all aligned aaRS sequences, “:” indicates residues within strong similarity between the aligned sequences, and “.” indicates residues within some similarity between the aligned sequences. Mm is Methanosarcina mazei; Mb is Methanosarcina barkeri; 1R26 is Methanomethylophilus sp. 1R26; Lum 1 is Methanomassiliicoccus luminyensis 1; Nitro is Nitrososphaeria archaeon; Tron is Methanonatronarchaeum thermophilum; Gemm is Gemmatimonadetes bacterium; PGA8 is Peptostreptococcaceae bacterium pGA-8; 12 is Desulfosporosinus sp. 12; Clos is Clostridiales bacterium; D121 is a Deltaproteobacteria bacterium; and D416 is another Deltaproteobacteria.

### DETAILED DESCRIPTION

[0209] The inventors demonstrate herein that it is possible to remove a first endogenous tRNA and a second endogenous tRNA from a prokaryotic cell, e.g. by deletion of the endogenous genes, to result in a viable cell.

[0210] Thus, in a first aspect of the invention, there is provided a prokaryotic cell wherein: the prokaryotic cell does not express a first endogenous tRNA and a second endogenous tRNA; and the prokaryotic cell comprises a genome wherein a first type of sense codon and a second type of sense codon have been recoded such that the first endogenous tRNA and the second endogenous tRNA are dispensable.

[0211] An endogenous tRNA is considered to be not expressed if the endogenous tRNA is not present in a form that would allow it to decode its cognate codon(s). Thus, an endogenous tRNA may be removed using any manner that would prevent the production of a functional form of the endogenous tRNA within the prokaryotic cell. For instance, the endogenous gene may be deleted or a portion of the gene may be deleted to prevent expression. Regulatory sequences may be deleted or altered to prevent expression. Alternatively, nonsense, frameshift, or missense mutations may prevent expression of the tRNA in a functional form.

[0212] The removals of the endogenous tRNAs are performed in prokaryotic cells wherein the genomes have been recoded to remove occurrences of particular types of sense codon. “Recoding” as used herein, is the replacement of an occurrence of a type of codon with a different codon, such that the occurrence of the codon is removed from the genome. The recoded sense codon may be replaced with a synonymous codon to result in different codon usage without changing the encoded polypeptide. Alternatively, the sense codon may be replaced with a non-synonymous codon, for instance if the alteration in the sequence of the encoded polypeptide does not affect viability. The deleted endogenous tRNAs are those that are dispensable in light of the recoding. “Dispensable” as used herein, means not required for viability of the prokaryotic cell.

[0213] Viable prokaryotic cells are cells that are capable of being metabolically active. In a particular embodiment, the viable prokaryotic cell of the invention may be capable of growth when cultured in an appropriate media and under appropriate conditions for the particular species or strain. Such prokaryotic cells may be referred to as capable of being cultured. As an example, if the prokaryotic cell is a bacterial cell such as E. coli, the assessment of viability may be performed by culturing said bacteria in a medium comprising LB medium, or on an agar comprising LB agar, at 37° C. The medium or agar may be supplemented with 2% glucose. Growth of the bacteria may be monitored using standard approaches, such as measurement of the OD600. Alternative approaches, or approaches adapted to particular prokaryotic cells, bacteria strains, bacterial species, or in light of the inclusion of marker genes, are known to the skilled person.

[0214] A tRNA that decodes one or more sense codons that have been replaced (or deleted) may be deleted and the prokaryotic cell will remain viable if the tRNA decodes only the one or more sense codons that have been replaced (or deleted); or alternatively if the tRNA decodes one or more sense codons that have been replaced (or deleted) and one or more sense codons that have not been replaced (or deleted), if the tRNA is dispensable for the one or more sense codons that have not been replaced (or deleted) (i.e. the one or remaining sense codons which the tRNA decodes are decoded by one or more alternative tRNAs). For example, if the genome of the prokaryotic cell lacks TCA sense codons, serT, encoding tRNA^{Ser}_{UGA}, may be deleted and/or if the genome lacks TCG sense codons, serU, encoding tRNA^{Ser}_{CGA}, may be deleted. Thus, in an embodiment, the prokaryotic cell expresses neither tRNA^{Ser}_{UGA} nor tRNA^{Ser}_{CGA}.

[0215] The number of occurrences of the first and second type of sense codon that are recoded is adequate to enable the removal of the cognate tRNAs corresponding to said sense codons while maintaining viability of the prokaryotic cell. For example, this may be achieved by removing all of the occurrences of the first and second type of sense codon from the essential genes. A gene is “essential”, as used herein, if the product of the gene is required for viability of the prokaryotic cell. For instance, if the prevention of expression of a functional form of a protein encoded by a gene would result in non-viability of the prokaryotic cell, then the gene is considered essential. In particular, a gene is considered essential if a “blank” codon (i.e. a codon for which the cell contains no corresponding tRNA or release factor) within the gene results in a loss of cell viability. Therefore, in an embodiment, all of the genes of the prokaryotic cell for which a blank codon could not be tolerated without a loss of viability are recoded, but genes that are able to tolerate blank codons may not be recoded. Thus, the skilled person can assess whether all of the essential genes have been recoded by assessing whether a cognate tRNA is dispensable.

[0216] In a particular embodiment, there is provided a prokaryotic cell, wherein: the prokaryotic cell does not express a first endogenous tRNA and a second endogenous tRNA; the essential genes of the prokaryotic cell do not contain occurrences of a first type of sense codon, and the first endogenous tRNA is a cognate tRNA for the first type of sense codon; and the essential genes of the prokaryotic cell do not contain occurrences of a second type of sense codon, and the second endogenous tRNA is a cognate tRNA for the second type of sense codon.

[0217] In particular embodiments, the genome comprises 100 or more, 200 or more, or 300 or more essential genes with no occurrences of the first and/or second type of sense codon. For instance, all or substantially all of the essential genes in the genome may comprise no occurrences of the first and/or second type of sense codon.

[0218] In some embodiments, the essential genes may be selected from one or more of the list consisting of: ribF, IspA, ispH, dapB, folA, imp, yabQ, ftsL, ftsl, murE, murF, mraY, murD, ftsW, murG, murC, ftsQ, ftsA, ftsZ, IpxC, secM, secA, can, folk, hemL, yadR, dapD, map, rpsB, tsf, pyrH, frr, dxr, ispU, cdsA, yaeL, yaeT, IpxD, fabZ, IpxA, IpxB, dnaE, accA, tilS, proS, yafF, hemB, secD, secF, ribD, ribE, thiL, dxs, ispA, dnaX, adk, hemH, IpxH, cysS, folD, entD, mrdB, mrdA, nadD, holA, ripB, leuS, Int, glnS, fldA, cydA, infA, cydC, ftsK, lolA, serS, rpsA, msbA, IpxK, kdsB, mukF, mukE, mukB, asnS, fabA, mviN, rne, fabD, fabG, acpP, tmk, holB, loIC, loID, loIE, purB, minE, minD, pth, prsA, ispE, lolB, hemA, prfA, prmC, kdsA, topA, ribA, fabl, tyrS, ribC, ydiL, pheT, pheS, rpIT, infC, thrS, nadE, gapA, yeaZ, aspS, argS, pgsA, yefM, metG, folE, yejM, gyrA, nrdA, nrdB, folC, accD, fabB, gltX, ligA, zipA, dapE, dapA, der, hisS, ispG, suhB, tadA, acpS, era, rnc, lepB, rpoE, pssA, yfiO, rpIS, trmD, rpsP, ffh, grpE, csrA, ispF, ispD, ftsB, eno, pyrG, chpR, Igt, fbaA, pgk, yqgD, metK, yqgF, plsC, ygiT, parE, ribB, cca, ygjD, tdcF, yraL, yhbV, infB, nusA, ftsH, obgE, rpmA, rpIU, ispB, murA, yrbB, yrbK, yhbN, rpsl, rpIM, degS, mreD, mreC, mreB, accB, accC, yrdC, def, fmt, rplQ, rpoA, rpsD, rpsK, rpsM, secY, rpIO, rpmD, rpsE, rpIR, rpIF, rpsH, rpsN, rplE, rpIX, rpIN, rpsQ, rpmC, rplP, rpsC, rpIV, rpsS, rplB, rplW, rpID, rpIC, rpsJ, fusA, rpsG, rpsL, trpS, yrfF, asd, rpoH, ftsX, ftsE, ftsY, yhhQ, bcsB, glyQ, gpsA, rfak, kdtA, coaD, rpmB, dfp, dut, gmk, spoT, gyrB, dnaN, dnaA, rpmH, rnpA, yidC, tnaB, gimS, gimU, wzyE, hemD, hemC, yigP, ubiB, ubiD, hemG, yihA, ftsN, murl, murB, birA, secE, nusG, rplJ, rpIL, rpoB, rpoC, ubiA, plsB, lexA, dnaB, ssb, alsK, groS, psd, orn, yjeE, rpsR, chpS, ppa, valS, yjgP, yjgQ, and dnaC.

[0219] In particular, the essential genes may be selected from one or more of the list consisting of: ribF, IspA, ispH, dapB, folA, imp, yabQ, IpxC, secM, secA, can, folk, hemL, yadR, dapD, map, rpsB, tsf, pyrH, frr, dxr, ispU, cdsA, yael, yaeT, IpxD, fabZ, IpxA, IpxB, dnaE, accA, tilS, proS, yafF, hemB, secD, secF, ribD, ribE, thiL, dxs, ispA, dnaX, adk, hemH, IpxH, cysS, folD, entD, mrdB, mrdA, nadD, holA, ripB, leuS, Int, ginS, fldA, cydA, infA, cydC, ftsK, lolA, serS, rpsA, msbA, IpxK, kdsB, mukF, mukE, mukB, asnS, fabA, mviN, rne, fabD, fabG, acpP, tmk, holB, loIC, loID, loIE, purB, minE, minD, pth, prsA, ispE, lolB, hemA, prfA, prmC, kdsA, topA, ribA, fabl, tyrS, ribC, ydiL, pheT, pheS, rpIT, infC, thrS, nadE, gapA, yeaZ, aspS, argS, pgsA, yefM, metG, folE, yejM, gyrA, nrdA, nrdB, folC, accD, fabB, gltX, ligA, zipA, dapE, dapA, der, hisS, ispG, suhB, tadA, acpS, era, rnc, lepB, rpoE, pssA, yfiO, rpIS, trmD, rpsP, ffh, grpE, csrA, ispF, ispD, ftsB, eno, pyrG, chpR, Igt, fbaA, pgk, yqgD, metK, yqgF, plsC, ygiT, parE, ribB, cca, ygjD, tdcF, yraL, yhbV, infB, nusA, ftsH, obgE, rpmA, rplU, ispB, murA, yrbB, yrbK, yhbN, rpsl, rpIM, degS, mreD, mreC, mreB, accB, accC, yrdC, def, fmt, rplQ, rpoA, rpsD, rpsK, rpsM, secY, rpIO, rpmD, rpsE, rplR, rplF, rpsH, rpsN, rpIE, rpiX, rpIN, rpsQ, rpmC, rplP, rpsC, rpIV, rpsS, rplB, rpIW, rpID, rpIC, rpsJ, fusA, rpsG, rpsL, trpS, yrfF, asd, rpoH, ftsX, ftsE, ftsY, yhhQ, bcsB, glyQ, gpsA, rfaK, kdtA, coaD, rpmB, dfp, dut, gmk, spoT, gyrB, dnaN, dnaA, rpmH, rnpA, yidC, tnaB, gimS, glmU, wzyE, hemD, hemC, yigP, ubiB, ubiD, hemG, yihA, ftsN, murl, murB, birA, secE, nusG, rplJ, rpIL, rpoB, rpoC, ubiA, plsB, lexA, dnaB, ssb, alsK, groS, psd, orn, yjeE, rpsR, chpS, ppa, valS, yjgP, yjgQ, and dnaC.

[0220] In other embodiments, the prokaryotic cell of the present invention may comprise a genome comprising 5 or fewer occurrences of the first and/or second type of sense codon. The genome may be derived from a parent genome and may comprise less than 10%, 5%, 2%, 1%, 0.5%, 0.1% of the occurrences of the first and/or second type of sense codon, relative to the parent genome. The genome may comprise 100 or more, 200 or more, or 1000 or more genes with no occurrences of the first and/or second type of sense codon. In particular, all or substantially all the genes in the genome may have no occurrences of the first and/or second type of sense codon.

[0221] Thus, in a particular embodiment, there is provided a prokaryotic cell, wherein: the prokaryotic cell does not express a first endogenous tRNA and a second endogenous tRNA; the genome of the prokaryotic cell comprises 5, 4, 3, 2, 1, or no occurrences of a first type of sense codon, and the first endogenous tRNA is a cognate tRNA for the first type of sense codon; and the genome of the prokaryotic cell comprises 5, 4, 3, 2, 1, or no occurrences of a second type of sense codon, and the second endogenous tRNA is a cognate tRNA for the second type of sense codon.

[0222] In a particular embodiment, the genome comprises no occurrences of the first type of sense codon and no occurrences of the second type of sense codon.

[0223] The genome may be derived from a parent genome and comprise 5 or fewer (e.g. 5, 4, 3, 2, 1), or no occurrences of native sense codons of the first and/or second type. In a particular embodiment, the genome is derived from a parent genome and comprises no occurrences of native sense codons of the first and the second type.

[0224] In some embodiments the genome comprises 100 or more, 200 or more, 300 or more, 400 or more, 500 or more, 600 or more, 700 or more, 800 or more, 900 or more, 1000 or more, 1500 or more, or 2000 or more recoded genes. In some embodiments the genes are those for which there is evidence of translation and/or of the predicted protein product. For example, the genome may comprise 100 or more, 200 or more, 300 or more, 400 or more, 500 or more 600 or more, 700 or more, 800 or more, 900 or more, 1000 or more, 1500 or more, or 2000 or more recoded genes for which there is evidence of translation and/or of the predicted protein product.

[0225] In an embodiment, all annotated open reading frames within the genome have no occurrences of the sense codons of the first and the second type. The prokaryotic cell of the invention may be a bacterial cell, preferably E. coli, and the genome of the E. coli may contain no occurrences of a first and a second type of sense codon as annotated in GenBank accession number CP040347.1.

[0226] In a particular embodiment, the protein-encoding genes have no occurrences of the sense codons of the first and the second type. In particular embodiments, no proteins are translated from any of the remaining occurrences of the first and/or second type of sense codon and/or genes comprising the remaining occurrences of the first and/or second type of sense codons are putative or are non-coding genes. In some embodiments the translation of the genes comprising the remaining occurrences of the first and/or second type of sense codons is reduced and/or prevented (e.g. the genes may comprise stop codons in the 5′ sequence).

[0227] Any remaining occurrences of the sense codons may be necessary to ensure that the genome is viable. For example, one or more, in particular all, of the remaining occurrences of the first and/or second type of sense codons in the genome may be present in the regulatory elements of essential genes; and/or one or more, in particular all, of the remaining occurrences of the first and/or second type of sense codons may be in genes in which there is no evidence for translation or the predicted protein product (i.e. putative or non-coding genes).

[0228] As used herein, a “sense codon” is a nucleotide triplet that codes for an amino acid. Thus, sense codons may be identified in a genome by gene prediction, i.e. by identifying regions of the genome that code for proteins (i.e. genes) and the corresponding open reading frames (ORFs). Typically, genomes naturally comprise 61 sense codons: GCT, GCC, GCA, GCG, CGT, CGC, CGA, CGG, AGA, AGG, AAT, AAC, GAT, GAC, TGT, TGC, CAA, CAG, GAA, GAG, GGT, GGC, GGA, GGG, CAT, CAC, ATT, ATC, ATA, TTA, TTG, CTT, CTC, CTA, CTG, AAA, AAG, ATG, TTT, TTC, CCT, CCC, CCA, CCG, TCT, TCC, TCA, TCG, AGT, AGC, ACT, ACC, ACA, ACG, TGG, TAT, TAC, GTT, GTC, GTA, and GTG (read from 5′ to 3′ on the coding strand of DNA). The standard genetic code encodes the 20 canonical amino acids using the 61 triplet codons. 18 of the 20 amino acids are encoded by more than one synonymous codon. The first or second type of sense codon may be native sense codons, i.e. sense codons which are present in the parent genome.

[0229] The 61 sense codons in DNA are transcribed into corresponding mRNA and subsequently decoded by one or more tRNAs. tRNAs carry an amino acid to a ribosome as directed by the sense codons in the mRNA. The tRNAs can recognise one or more sense codons via a complementary anticodon. A sequence of sense codons is subsequently translated into a polypeptide (i.e. a sequence of amino acids). Codon and anticodon interactions in the E. coli genome are shown in FIG. 17 of WO2020/229592 (incorporated herein by reference).

[0230] The genome wide removal of the first and/or second type of sense codon, but not other sense codons, enables cognate tRNAs corresponding to said first or second type of sense codons to be deleted without removing the ability to decode the sense codons remaining in the genome.

[0231] Aminoacyl-tRNA synthetases for serine do not recognise the anticodons of their cognate tRNAs. This may facilitate the assignment of codons to new amino acids through the introduction of tRNAs bearing cognate anticodons that do not direct mis-aminoacylation by endogenous synthetases. Thus, the recoded sense codons may be selected from: TCG, TCA, TCT, TCC, AGT, or AGC. In a particular embodiment, the first and second type of sense codon are TCA and TCG.

[0232] To achieve removal of sense codons they may be replaced with synonymous sense codons. This is preferable to ensure that the encoded protein sequence is not changed. For instance, the prokaryotic cell may have a genome wherein 90% or more, 95% or more, 98% or more, 99% or more, 99.5% or more, 99.6% or more, 99.7% or more, 99.8% or more, 99.9% or more, or 100% of the occurrences of the first or second type of sense codons in the parent genome is replaced with synonymous sense codons. The person skilled in the art is able to deduce suitable synonymous sense codon replacements. For example, in E. coli, typically TCG, TCA, TCT, TCC, AGT and AGC all encode serine.

[0233] In some embodiments, the replacement is a defined replacement, i.e. one sense codon is replaced with a single synonymous sense codon. Preferably, 90% or more, 95% or more, 98% or more, 99% or more, 99.5% or more, 99.6% or more, 99.7% or more, 99.8% or more, 99.9% or more, or 100% of the occurrences of the first or second type of sense codon in the parent genome are is replaced with a defined (i.e. single) synonymous sense codon.

[0234] For example, the defined replacement may be: TCG replaced with any one of TCT, TCC, AGT, or AGC; or TCA replaced with any one of TCT, TCC, AGT, or AGC.

[0235] In particular, the replacements are selected from one or more of: TCG to either AGT or AGC; or TCA to either AGT or AGC. In a particular embodiment, TCG is replaced with AGC and TCA is replaced with AGT.

[0236] Preferably, none of these codon replacements affect ribosomal binding sites (AGGAGG), which are highly conserved regulatory sequences in E. coli. The selected codon replacements may be tested on a small test region (e.g. a 20 kb region of the genome rich in both essential target genes and target codons) to assess viability. If the codon replacements are not viable on the small test region they may be disregarded.

[0237] When replacement of sense codons in the parent genome with defined replacement synonymous sense codons does not result in a viable prokaryotic cell, alternative replacement synonymous sense codons may be used. For instance, 99.9% of the occurrences of the first and/or second type of sense codon in the parent genome may be replaced with a defined (i.e. single) synonymous sense codon, and the remaining 0.1% with alternative synonymous sense codons. For example, 99.9% of the occurrences of TCG may be replaced with AGC and 0.1% replaced with TCT, TCC, AGT or AGC; and/or 99.9% of the occurrences of TCA may be replaced with AGT and 0.1% replaced with TCT, TCC, AGT or AGC.

[0238] In some instances, a particular occurrence of a sense codon may not be replaceable with any of the potential synonymous sense codons without affecting viability. To retain viability, the sense codon may be replaced with a non-synonymous sense codon that does not affect viability. For instance, 99.9% of the occurrences of the first and/or second type of sense codon in the parent genome may be replaced with a defined (i.e. single) synonymous sense codon, and the remaining 0.1% with alternative non-synonymous sense codons.

[0239] The inventors have additionally demonstrated that it is possible to remove an endogenous release factor from a prokaryotic cell of the invention while retaining viability, such that the resultant cell does not express at least two endogenous tRNAs and does not express at least one endogenous release factor. Thus, in an embodiment, the prokaryotic cell does not express a first endogenous release factor; and a first type of stop codon has been recoded within the genome of the prokaryotic cell such that the first endogenous release factor is dispensable.

[0240] The removal of the first endogenous release factor may performed in prokaryotic cells wherein the genomes have been recoded to remove occurrences of a first type of stop codon. Optionally the removed stop codons are replaced with synonymous codons. The deleted endogenous release factor is the factor that is dispensable in light of the recoding.

[0241] In a particular embodiment, there is provided a prokaryotic cell, wherein the prokaryotic cell does not express a first endogenous tRNA, a second endogenous tRNA, and a first endogenous release factor; and wherein the genome of the prokaryotic cell has been recoded to remove a plurality of the sense codons for which the first and second endogenous tRNAs are cognate, and to remove a plurality of the stop codon for which the first endogenous release factor is cognate.

[0242] An endogenous release factor is considered to be not expressed if the endogenous release factor is not present in a form that would allow it to decode its cognate codon(s). Thus, an endogenous release factor may be removed using any manner that would prevent the production of a functional form of the endogenous release factor within the prokaryotic cell. For instance, the endogenous gene may be deleted or a portion of the gene may be deleted to prevent expression. Regulatory sequences may be deleted or altered to prevent expression. Alternatively, nonsense, frameshift, or missense mutations may prevent expression of the release factor in a functional form.

[0243] As used herein, a “stop codon” is a nucleotide triplet that codes for termination of translation into proteins. Typically, genomes naturally comprise 3 stop codons: TAA (“ochre”), TGA (“opal” or “umber”) and TAG (“amber”).

[0244] The number of occurrences of the first type of stop codon that are removed is adequate to enable the removal of the cognate release factor corresponding to said stop codons while maintaining viability of the prokaryotic cell.

[0245] Thus, in some embodiments, the essential genes of the prokaryotic cell do not contain occurrences of the first type of stop codon. The essential genes may be any as discussed herein, particularly those discussed in relation to the removal of the first or second type of sense codon. In particular embodiments, the genome comprises 100 or more, 200 or more, or 300 or more essential genes with no occurrences of the first type of stop codon. For instance, all or substantially all of the essential genes in the genome may comprise no occurrences of the first type of stop codon.

[0246] For example, the genome may comprise 100 or more, 200 or more, or 300 or more essential genes with no occurrences of the first type of sense codon, the second type of sense codon, and the first type of stop codon. In particular, all or substantially all of the essential genes in the genome may comprise no occurrences of the first type of sense codon, the second type of sense codon, and the first type of stop codon.

[0247] In some embodiments, the genome comprises 10 or fewer, 5 or fewer, or no occurrences of the first type of stop codon. Such as 5, 4, 3, 2, 1, or no instances of the first type of stop codon.

[0248] In a particular embodiment, wherein the first type of stop codon is TAG and the first endogenous release factor is RF-1. In such embodiments, there may be 10 or fewer, 5 or fewer, or no occurrences of the amber stop codon (TAG). In other examples, 90% or more, 95% or more, 98% or more, 99% or more, or all of the occurrences of TAG in the parent genome are replaced with TAA (the ochre stop codon). In particular embodiments, the genome comprises no occurrences of the amber stop codon (TAG), optionally wherein all of the occurrences of TAG in the parent genome are replaced with TAA (the ochre stop codon).

[0249] In an embodiment, all annotated open reading frames within the genome have no occurrences of the first type of stop codon. The prokaryotic cell of the invention may be a bacterial cell, preferably E. coli, and the genome of the E. coli may contain no occurrences of first type of stop codon as annotated in GenBank accession number CP040347.1.

[0250] In a particular embodiment, the protein-encoding genes have no occurrences of the first type of stop codon. In particular embodiments, no proteins are translated from any of the remaining occurrences of the first type of stop codon and/or genes comprising the remaining occurrences of the first type of stop codon are putative or are non-coding genes. In some embodiments the translation of the genes comprising the remaining occurrences of the first type of stop codon is reduced and/or prevented (e.g. the genes may comprise stop codons in the 5′ sequence).

[0251] Any remaining occurrences of the first type of stop codon may be necessary to ensure that the genome is viable. For example, one or more, in particular all, of the remaining occurrences of the first type of stop codon in the genome may be present in the regulatory elements of essential genes; and/or one or more, in particular all, of the remaining occurrences of the first type of stop codon may be in genes in which there is no evidence for translation or the predicted protein product (i.e. putative or non-coding genes).

[0252] Accordingly, in some embodiments the genome comprises no occurrences of a first and a second type of sense codon, and no occurrences of one stop codon, preferably the amber stop codon (TAG). In particular embodiments the genome comprises no occurrences of the sense codons TCG and TCA, and no occurrences of the amber stop codon (TAG), optionally wherein TCG, TCA and TAG in the parent genome are replaced with synonymous codons, for example 99.9% or more of the occurrences of TCG in the parent genome are replaced with AGC, 99.9% or more of the occurrences of TCA in the parent genome are replaced with AGT and all of the occurrences of TAG in the parent genome are replaced with TAA.

[0253] In a particular embodiment, the genome of the prokaryotic cell has been recoded such that the sense codon TCG has been replaced with AGC, the sense codon TCA has been replaced with AGT, and the stop codon TAG has been replaced with TAA, and wherein sufficient numbers of said codons have been recoded such that two cognate tRNAs and a cognate release factor are dispensable.

[0254] In a particular embodiment, the prokaryotic cell of the invention is an E. coli cell that does not express tRNA^{Ser}_{UGA}, tRNA^{Ser}_{CGA}, or RF-1, occurrences of the sense codon TCA have been recoded such that tRNA^{Ser}_{UGA} is dispensable (e.g. occurrences of TCA in essential genes of the parent strain have been replaced with AGT), occurrences of the sense codon TCG have been recoded such that tRNA^{Ser}_{CGA} is dispensable (e.g. occurrences of TCG in essential genes of the parent strain have been replaced with AGC), and occurrences of the stop codon TAG have been recoded such that RF-1 is dispensable (e.g. occurrences of TAG in essential genes of the parent strain have been replaced with TAA). The prokaryotic cell may also have been modified to include first, second, and third orthogonal aminoacyl-tRNA synthetase-tRNA pairs capable of decoding the TCA, TCG, and TAG codons and incorporating non-canonical amino acids into such sites during polymer formation.

[0255] In some embodiments the genome of the prokaryotic cell of the invention comprises a polynucleotide sequence which is at least 80%, 85%, 90%, 95%, 98%, 99%, 99.5%, 99.8%, 99.9%, or 100% identical to the sequence provided in GenBank accession number CP040347.1, and wherein the genome has been further altered such that tRNA^{Ser}_{UGA} and tRNA^{Ser}_{CGA} are not functionally expressed (for instance, by deleting serT and serU). The genome may have been even further altered such that RF-1 is not functionally expressed (for instance, by deleting prfA). An E. coli strain comprising a genome according to GenBank accession number CP040347.1 is referred to as Syn61 WT in the Examples disclosed herein.

[0256] In some embodiments the genome of the prokaryotic cell of the invention comprises a polynucleotide sequence which is at least 80%, 85%, 90%, 95%, 98%, 99%, 99.5%, 99.8%, 99.9%, or 100% identical to SEQ ID NO: 3, and wherein the genome has been further altered such that tRNA^{Ser}_{UGA} and tRNA^{Ser}_{CGA} are not functionally expressed (for instance, by deleting serT and serU). The genome may have been even further altered such that RF-1 is not functionally expressed (for instance, by deleting prfA). An E. coli strain comprising a genome according to SEQ ID NO: 3 is referred to as Syn61(ev1) in the Examples disclosed herein.

[0257] In some embodiments the genome of the prokaryotic cell of the invention comprises a polynucleotide sequence which is at least 80%, 85%, 90%, 95%, 98%, 99%, 99.5%, 99.8%, 99.9%, or 100% identical to SEQ ID NO: 4, and wherein the genome has been further altered such that tRNA^{Ser}_{UGA} and tRNA^{Ser}_{CGA} are not functionally expressed (for instance, by deleting serT and serU). The genome may have been even further altered such that RF-1 is not functionally expressed (for instance, by deleting prfA). An E. coli strain comprising a genome according to SEQ ID NO: 4 is referred to as Syn61(ev2) in the Examples disclosed herein.

[0258] In some embodiments the genome of the prokaryotic cell of the invention comprises a polynucleotide sequence which is at least 80%, 85%, 90%, 95%, 98%, 99%, 99.5%, 99.8%, 99.9%, or 100% identical to SEQ ID NO: 5. An E. coli strain comprising a genome according to SEQ ID NO: 5 is referred to as Syn61Δ3 in the Examples disclosed herein.

[0259] In some embodiments the genome of the prokaryotic cell of the invention comprises a polynucleotide sequence which is at least 80%, 85%, 90%, 95%, 98%, 99%, 99.5%, 99.8%, 99.9%, or 100% identical to SEQ ID NO: 6. An E. coli strain comprising a genome according to SEQ ID NO: 6 is referred to as Syn61Δ3(ev3) in the Examples disclosed herein.

[0260] In some embodiments the genome of the prokaryotic cell of the invention comprises a polynucleotide sequence which is at least 80%, 85%, 90%, 95%, 98%, 99%, 99.5%, 99.8%, 99.9%, or 100% identical to SEQ ID NO: 7. An E. coli strain comprising a genome according to SEQ ID NO: 7 is referred to as Syn61Δ3(ev4) in the Examples disclosed herein.

[0261] In some embodiments the genome of the prokaryotic cell of the invention comprises a polynucleotide sequence which is at least 80%, 85%, 90%, 95%, 98%, 99%, 99.5%, 99.8%, 99.9%, or 100% identical to SEQ ID NO: 8 (also provided as GenBank accession number CP071799.1). An E. coli strain comprising a genome according to SEQ ID NO: 8 is referred to as Syn61Δ3(ev5) in the Examples disclosed herein.

[0262] There is provided herein a prokaryotic cell comprising a genome which is at least 80%, 85%, 90%, 95%, 98%, 99%, 99.5%, 99.8%, 99.9%, or 100% identical to any one of: SEQ ID NO: 3, SEQ ID NO: 4, SEQ ID NO: 5, SEQ ID NO: 6, SEQ ID NO: 7, and SEQ ID NO: 8. The prokaryotic cell may be a bacterium, for instance E. coli. In some embodiments, the calculation of the sequence identity percentage excludes any sequence that has been inserted to enable the expression of an orthogonal aminoacyl-tRNA synthetase-tRNA pair or multiple orthogonal pairs. The calculation of sequence identity percentage may further exclude any exogenous sequences that have been further introduced into the genome. The genomes with less than 100% identity may comprise the recoded sense and stop codons as disclosed herein, hence in such embodiments the variation does not reintroduce the first type of sense codon, second type of sense codon, or first type of stop codon.

[0263] The inventors have identified that prokaryotic cells with recoded genomes or which lack a first and/or a second endogenous tRNA may have growth defects, unless specific steps are taking during the production of said prokaryotic cells. These steps are described herein.

[0264] The inventors further noted that some methods of inducing mutagenesis, for instance those involving the use of a mutagenesis plasmid, are not functional in the prokaryotic cells of the invention. The inventors have overcome this issue through the provision of specifically adapted reagents.

[0265] Thus, in a particular embodiment, the growth rate of the prokaryotic cell is faster than the growth rate of a reference prokaryotic cell of a parental strain.

[0266] The growth rates may be compared by preparing a cell culture of the prokaryotic cell of the invention, and a cell culture of the reference prokaryotic cell, and comparing the rate of change of the optical density of the culture medium. In some embodiments, the prokaryotic cell is a bacterial cell, such as E. Coli, and the growth rates are compared by determined the doubling time at 37° C., 25° C. or 42° C. in LB media. The doubling time of the prokaryotic cell of the invention may be 1.1, 1.2, 1.3, 1.4, 1.5, 1.6, 1.7, 1.8, 1.9, 2, or 3 times faster than the doubling time of the reference prokaryotic cell.

[0267] A “parental strain” is a strain that existed or was created as part of the development of the prokaryotic cell of the invention. Hence, the prokaryotic cell of the invention is derived, directly or indirectly, from the parental strain. A parental strain may also be referred to as a “progenitor strain”.

[0268] The parental strain may be the prokaryotic cell strain obtained upon recoding the genome to remove particular types of sense and/stop codons, but before further steps are taken. The parental strain may comprise a genome wherein a first type of sense codon, a second type of sense codon, and a first type of stop codon have been recoded in the same manner as for a prokaryotic cell of the invention, and wherein the parental strain contains all endogenous tRNAs and release factors. For example, the parental strain may be the strain obtained upon recoding the genome to remove or reduce the number of TCG, TCA, and TAG codons. In a particular embodiment, the parental strain may be Syn61 or may comprise the genome of Syn61 (i.e. the sequence in GenBank accession number CP040347.1).

[0269] The parental strain may be the prokaryotic cell strain obtained upon removal of a first endogenous tRNA, a second endogenous tRNA, and/or a release factor, but before further steps are taken. For example, the parental strain may be the strain obtained upon removal of tRNA^{Ser}_{UGA}, tRNA^{Ser}_{CGA}, and RF-1. In a particular embodiment, the parental strain may be Syn61Δ3 or may comprise the genome of Syn61Δ3 (SEQ ID NO: 5).

[0270] The inventors provide experimental data herein demonstrating that the prokaryotic cell of the invention are resistant to phage. While it had been previously hypothesised that removing cellular tRNAs would provide phage resistance, the inventors have found that the removal of a first and a second endogenous tRNA provides complete resistance. This level of phage resistance is beyond that which would be predicted from the additive effect of removing these two tRNAs. Without being bound to a particular theory, the inventors note that endogenous tRNAs overlap in the codons that they are able to decode, and that some degree of read-through may be possible even where the tRNA is not normally known to be associated with the codon. As such, the removal of the first and the second endogenous tRNA synergises to provide a completely resistant prokaryotic cell.

[0271] Further to the preceding paragraph, the inventors provide data herein that demonstrate that the prokaryotic cells of the invention are more resistant to the accumulation of mutations that could lead to the rescue of viral propagation. For instance, the inventors noted that knocking out the gene ssrA in other strains, which have at least some phage resistance, can rescue viral propagation. In contrast, the knock out of ssrA from prokaryotic cells of the invention does not rescue viral propagation (FIG. 19). As such, the prokaryotic cells of the invention demonstrate surprisingly robust phage resistance, even if further mutations are accumulated.

[0272] Hence, in an embodiment, the prokaryotic cell of the invention is resistant to phage infection. The phage may be any phage containing the first type of sense codon, the second type of sense codon, and/or the first type of stop codon in its genome. For example, the prokaryotic cell of the invention may be resistant to T4 phage, T6 phage, T7 phage, λ phage, or P1vir phage. In some embodiments, prokaryotic cells of the invention are resistant to all five of these examples.

[0273] The prokaryotic cell of the invention may be resistant to horizontal gene transfer. For instance, horizontal transfer of the F plasmid.

[0274] The prokaryotic cell of the invention may be more resistant to infection or horizontal gene transfer than a reference prokaryotic cell which is of a parental strain. The parental strain may be any as described herein.

[0275] In some embodiments, prokaryotic cell of the invention are completely resistant to phage. The prokaryotic cell may be completely resistant to T4 phage, T6 phage, T7 phage, λ phage, and P1vir phage. The term “completely resistant”, as used herein, means that the growth rate of a culture of the prokaryotic cell of the invention is substantially or completely unaffected by the inclusion of a relevant phage in said culture. A control may be the inclusion of the same amount of killed phage. A relevant phage is a phage that would be capable of infecting a parental strain of the prokaryotic cell.

[0276] In particular embodiments, the prokaryotic cell of the invention is a bacterial cell. The bacterial cell may be of any species suitable for heterologous protein production, in particular the production of polypeptides comprising one or more non-canonical amino acids (for instance those described by Ferrer-Miralles, N. and Villaverde, A., 2013. Microbial Cell Factories, 12:113). Suitable bacterial host cells include: escherichia (e.g. Escherichia coli), caulobacteria (e.g. Caulobacter crescentus), phototrophic bacteria (e.g. Rodhobacter sphaeroides), cold adapted bacteria (e.g. Pseudoalteromonas haloplanktis, Shewanella sp. strain Ac10), pseudomonads (e.g. Pseudomonas fluorescens, Pseudomonas putida, Pseudomonas aeruginosa), halophilic bacteria (e.g. Halomonas elongate, Chromohalobacter salexigens), streptomycetes (e.g. Streptomyces lividans, Streptomyces griseus), nocardia (e.g. Nocardia lactamdurans), mycobacteria (e.g. Mycobacterium smegmatis), coryneform bacteria (e.g. Corynebacterium glutamicum, Corynebacterium ammoniagenes, Brevibacterium lactofermentum), bacilli (e.g. Bacillus subtilis, Bacillus brevis, Bacillus megaterium, Bacillus licheniformis, Bacillus amyloliquefaciens), vibrio bacteria (e.g. Vibrio cholera, Vibrio natriegens), and lactic acid bacteria (e.g. Lactococcus lactis, Lactobacillus plantarum, Lactobacillus casei, Lactobacillus reuteri, Lactobacillus gasseri). In some embodiments the bacterium is gram-negative bacterium.

[0277] In particular embodiments, the bacterium is an Escherichia coli, Salmonella enterica, or Shigella dysenteriae. More preferably, the cell is an E. coli. Suitable E. coli cells include K-12, MG1655, BL21, BL21(DE3), AD494, Origami, HMS174, BLR(DE3), HMS174(DE3), Tuner(DE3), Origami2(DE3), Rosetta2(DE3), Lemo21(DE3), NiCo21(DE3), T7 Express, SHuffle Express, C41(DE3), C43(DE3), and m15 pREP4 or derivatives thereof (Rosano, G. L. and Ceccarelli, E. A., 2014. Frontiers in microbiology, 5, p.172). In particular, the cell may be MG1655 or BL21, or a derivative thereof. MG1655 is considered as the wild type strain of E coli. The GenBank ID of genomic sequence of this strain is U00096. BL21 is widely available commercially. For example, it can be purchased from New England BioLabs with catalog number C2530H.

[0278] The prokaryotic cell may contain a genome which is derived from the same species or strain, or may be derived from a different species. For example, if the prokaryotic cell is E. coli the genome may be an E. coli genome.

### Prokaryotic Cells Comprising Orthogonal Aminoacyl-tRNA Synthetase-RNA Pairs

[0279] The inventors provide experimental data herein demonstrating that a first orthogonal aminoacyl-tRNA synthetase and a first orthogonal tRNA, which form an orthogonal pair, may be introduced into a prokaryotic cell of the invention to replace an endogenous tRNA. The first orthogonal tRNA may decode a type of sense codon which has been removed from the genome, for instance the first type of sense codon may have been removed from the genome in any manner disclosed herein. The first orthogonal aminoacyl-tRNA synthetase specifically aminoacylates the orthogonal cognate tRNA with an amino acid, which may be a non-canonical amino acid. Hence, the prokaryotic cell may contain a system wherein an endogenous tRNA has been replaced with a first orthogonal tRNA, such that a first type of sense codon is repurposed to code for a non-canonical amino acid.

[0280] In addition, the inventors provide experimental data herein demonstrating that a first orthogonal aminoacyl-tRNA synthetase-tRNA pair and a second orthogonal aminoacyl-tRNA synthetase-tRNA pair may be introduced into a prokaryotic cell of the invention. The first tRNA may decode one of the sense codons removed from the genome, and the second tRNA may decode the other sense codon. The orthogonal aminoacyl-tRNA synthetases specifically aminoacylate their orthogonal cognate tRNA with an amino acid, which may be a non-canonical amino acid. Hence, the prokaryotic cell may contain a system wherein two or more sense codons have been repurposed to code for non-canonical amino acids.

[0281] In cells wherein a stop codon has been recoded, a third orthogonal aminoacyl-tRNA synthetase-tRNA pair may be introduced into the prokaryotic cell, allowing the recoded stop codon to be used to code for a third non-canonical amino acid. Hence, the prokaryotic cell may contain a system wherein two or more sense codons and one or more stop codons have been repurposed to code for a first, second, and third non-canonical amino acid. In a particular embodiment, the prokaryotic cell contains a system wherein TCA, TCG, and TAG encode a first, second, and third non-canonical amino acid. The first, second, and third non-canonical amino may be different from each other.

[0282] Thus, the orthogonal aminoacyl-tRNA synthetase (aaRS)-tRNA pairs may be capable of directing the incorporation of non-canonical amino acids into polymers using the protein synthesis apparatus of the prokaryotic cell. The orthogonal synthetases do not recognize endogenous tRNAs, and specifically aminoacylate an orthogonal cognate tRNA (which is not an efficient substrate for endogenous synthetases) with the non-canonical amino acids provided to (or synthesised by) the cell (Chin, J. W., 2017. Nature, 550 (7674), 53-60).

[0283] In an embodiment, there is provided a prokaryotic cell wherein: the prokaryotic cell does not express a first endogenous tRNA, the prokaryotic cell comprises a genome wherein a first type of sense codon has been recoded such that the first endogenous tRNA is dispensable, the prokaryotic cell expresses a first orthogonal aminoacyl-tRNA synthetase and a first orthogonal tRNA, the first orthogonal aminoacyl-tRNA synthetase and the first orthogonal tRNA form a first orthogonal aminoacyl-tRNA synthetase-tRNA pair, and the first orthogonal tRNA is capable of decoding the first type of sense codon.

[0284] In another embodiment, there is provided a prokaryotic cell wherein: the prokaryotic cell does not express a first endogenous tRNA and a second endogenous tRNA, the prokaryotic cell comprises a genome wherein a first type of sense codon and a second type of sense codon have been recoded such that the first endogenous tRNA and the second endogenous tRNA are dispensable,
[0285] the prokaryotic cell expresses a first orthogonal aminoacyl-tRNA synthetase and a first orthogonal tRNA, the first orthogonal aminoacyl-tRNA synthetase and the first orthogonal tRNA form a first orthogonal aminoacyl-tRNA synthetase-tRNA pair, the first orthogonal tRNA is capable of decoding the first type of sense codon, and
[0286] the prokaryotic cell expresses a second orthogonal aminoacyl-tRNA synthetase and a second orthogonal tRNA, the second orthogonal aminoacyl-tRNA synthetase and the second orthogonal tRNA form a second orthogonal aminoacyl-tRNA synthetase-tRNA pair, the second orthogonal tRNA is capable of decoding the second type of sense codon.

[0287] In yet another embodiment, there is provided a prokaryotic cell, wherein:
[0288] the prokaryotic cell does not express a first endogenous tRNA, a second endogenous tRNA, and a first endogenous release factor,
[0289] the prokaryotic cell comprises a genome wherein a first type of sense codon and a second type of sense codon have been recoded such that the first endogenous tRNA and the second endogenous tRNA are dispensable, and a first type of stop codon has been recoded such that the first endogenous release factor is dispensable,
[0290] the prokaryotic cell expresses a first orthogonal aminoacyl-tRNA synthetase and a first orthogonal tRNA, the first orthogonal aminoacyl-tRNA synthetase and the first orthogonal tRNA form a first orthogonal aminoacyl-tRNA synthetase-tRNA pair, the first orthogonal tRNA is capable of decoding the first type of sense codon;
[0291] the prokaryotic cell expresses a second orthogonal aminoacyl-tRNA synthetase and a second orthogonal tRNA, the second orthogonal aminoacyl-tRNA synthetase and the second orthogonal tRNA form a second orthogonal aminoacyl-tRNA synthetase-tRNA pair, the second orthogonal tRNA is capable of decoding the second type of sense codon; and
[0292] the prokaryotic cell expresses a third orthogonal aminoacyl-tRNA synthetase and a third orthogonal tRNA,
[0293] the third orthogonal aminoacyl-tRNA synthetase and the third orthogonal tRNA form a third orthogonal aminoacyl-tRNA synthetase-tRNA pair, and
[0294] the third orthogonal tRNA is capable of decoding the first type of stop codon.

[0295] The aminoacyl-tRNA synthetases used herein may be varied. Although specific tRNA synthetase sequences may have been used in the examples, the invention is not intended to be confined only to those examples. In principle any aminoacyl-tRNA synthetase which provides a tRNA charging (aminoacylation) function can be employed. For example the tRNA synthetase may be from any suitable species such as from archaea, for example from Methanosarcina-such as Alethanosarcina barkeri MS; Methanosarcina barkeri str. Fusaro; Methanosarcina mazei G01; Methanosarcina acetivorans C2A; Methanosarcina thermophila; or Methanococcoides-such as Methanococcoides burtonii. Alternatively the tRNA synthetase may be from bacteria, for example from Desulfitobacterium-such as Desulfitobacterium hafniense DCB-2; Desulfitobacterium hafniense Y51; Desulfitobacterium hafniense PCP1; or Desulfotomaculum acetoxidans DSM 771.

[0296] The aminoacyl-tRNA synthetase may be a pyrrolysyl tRNA synthetase (PyIRS). The PyIRS may be a wild-type or a genetically engineered PyIRS. Genetically engineered PyIRS has been described, for example, by Neumann et al. (Nat Chem Biol 4:232, 2008) and by Yanagisawa et al. (Chem Biol 2008, 15:1187), in EP2192185A1, and in WO2016/066995 (each incorporated herein by reference). Suitably, a genetically engineered tRNA synthetase gene is selected that increases the incorporation efficiency of non-canonical amino acid(s). The PyIRS may be Methanosarcina barkeri (MbPyIRS) or Methanosarcina mazei (MmPyIRS).

[0297] The tRNA used herein may be varied. Although specific tRNAs may have been used in the examples, the invention is not intended to be confined only to those examples. In principle, any tRNA can be used provided that it is compatible with the selected tRNA synthetase.

[0298] The tRNA may be from any suitable species such as from archea, for example from Methanosarcina—such as Methanosarcina barkeri MS; Methanosarcina barkeri str. Fusaro; Methanosarcina mazei. G01; Methanosarcina acetivorans C2A; Methanosarcina thermophila; or Methanococcoides—such as Methanococcoides burtonii. Alternatively the tRNA may be from bacteria, for example from Desulfitobacterium-such as Desulfitobacterium hafniense DCB-2; Desulfitobacterium hafniense Y51; Desulfitobacterium hafniense PCP1; or Desulfotomaculum acetoxidans DSM 771.

[0299] The tRNA gene can be a wild type tRNA gene or it may be a mutated tRNA gene. Suitably, a mutated tRNA gene is selected that increases the incorporation efficiency of unnatural amino acid(s). In one embodiment, the mutated tRNA gene is a U25C variant of PyIT as described in Biochemistry (2013) 52, 10 (incorporated herein by reference).

[0300] In one embodiment, the mutated tRNA gene is an Opt variant of PyIT as described in Fan et al. (Nucleic Acids Research doi: 10.1093/nar/gkv800) (incorporated herein by reference herein).

[0301] In one embodiment, the mutated tRNA gene has both the U25C and the Opt variants of PyIT, i.e. in this embodiment the tRNA, such as the PyIT tRNACUA gene, comprises both the U25C and the Opt mutations.

[0302] In one embodiment, the sequence encoding the tRNA is the pyrrolysine tRNA (PyIT) gene from Methanosarcina mazei pyrrolysine which encodes tRNAPyl.

[0303] The aminoacyl-tRNA synthetase and tRNA pair may be as disclosed in, or adapted from those disclosed in, Cervettini et al. (Rapid discovery and evolution of orthogonal aminoacyl-tRNA synthetase-tRNA pairs, Nature Biotechnology, Vol 38, 990 August 2020, P989-999) or Dunkelmann et al. (Engineered triply orthogonal pyrrolysyl-tRNA synthetase/tRNA pairs enable the genetic encoding of three distinct non-canonical amino acids, Nature Chemistry, Vol 12, June 2020 P535-544). Each of these documents is incorporated by reference.

[0304] As mentioned in the background section, the aaRS, tRNA, and codon preferably function together and are orthogonal to each endogenous amino acid, aaRS and group of isoacceptor tRNAs and their cognate group of codons. In addition, there is the potential for interactions between components of the first, second, and third ncAA:aaRS:tRNA:codon sets, and these are preferably also minimised.

[0305] As such, the identification of multiple engineered mutually orthogonal aaRS/tRNA pairs that recognise distinct codons and incorporate distinct non-canonical amino acids, and can be used in combination, provides a valuable contribution to the art. The inventors provide herein novel aaRS and tRNA pairs, and also provide new combinations of said pairs that are demonstrated herein to function in combination.

[0306] Thus, in an aspect of the invention there is provided the aaRS Methanomethylophilus sp. 1R26 PyIRS (1R26PyIRS). 1R26PyIRS may have the following sequence:

(SEQ ID NO: 9)
MAEHFTDAQIQRLREYGNGTYKDMEFADVSAREKAFTKLMSDASRDNES
ALKGMIAHPARQGLSRLMNDIADALVADGFIEVRTPIIISKDALAKMTI
TPDKPLFKQVFWIDDKRALRPMLAPSLYTVMRSLRDHTDGPVKIFEMGS
CFRKESHSGMHLEEFTMLNLVDMGPAGDATESLKKYIGIVMKAAGLPDY
QLVHEESDVYKETIDVEINGQEVCSAAVGPHYLDAAHDVHEPWAGAGFG
LERLLTIRQGYSTVMKGGASTTYLNGAKMD.

[0307] In an embodiment, the synthetase is a variant of 1R26PyIRS further comprising mutations necessary to allow the recognition of, or to alter the specificity for, a non-canonical amino acid. In particular embodiments, the aaRS may be according to SEQ ID NO: 9, comprising any one or a combination of substitutions at the following residues: L121, L125, Y126, M129, N166, V168, Y206, A223. Mutation at the aforementioned residues may be used to generate variants of 1R26PyIRS with altered selectivity to non-canonical amino acids.

[0308] The synthetase may be 1R26PyIRS (CbzK). 1R26PyIRS (CbzK) may be a mutant of 1R26PyIRS comprising the following mutations: i) Y126G and M129L, or ii) M129A and Y206F.

[0309] 1R26PyIRS(CbzK) is suitable for directing the incorporation of NE-(carbobenzyloxy)-l-lysine (CbzK). 1R26PyIRS(CbzK) may according to SEQ ID NO: 10 or 11.

[0310] The synthetase may be 1R26PyIRS(Allock). 1R26PyIRS(AllocK) may be a mutant of 1R26PyIRS comprising the mutations N166Q and Y206F, and is suitable for directing the incorporation of 6-N-Alloc-L-lysine (Allock). 1R26PyIRS(AllocK) may according to SEQ ID NO: 12.

[0311] The synthetase may be 1R26PyIRS(Bta). 1R26PyIRS(Bta) may be a mutant of 1R26PyIRS comprising the mutations N166S, V168M, Y206F, and A223G, and is suitable for directing the incorporation of 3-Benzothienyl-L-alanine (Bta). 1R26PyIRS(Bta) may according to SEQ ID NO: 13.

[0312] The synthetase may be 1R26PyIRS(NMH). 1R26PyIRS(NMH) may be a mutant of 1R26PyIRS comprising the mutations L121M, L1251, Y126F, M129A, V168F, and is suitable for directing the incorporation of 3-N-Methyl-L-histidine (NMH). 1R26PyIRS(NMH) may according to SEQ ID NO: 14.

[0313] In an embodiment, the aaRS is at least 50%, 60%, 70%, 80%, 90%, 95%, 99%, or 100% similar or identical to any one of SEQ ID NOs: 9-14. The aaRS may be at least 50%, 60%, 70%, 80%, 90%, 95%, 99%, or 100% identical to SEQ ID NO: 9, comprising any one of the following groups of mutations: i) L121L, L125L, Y126G, M129L, N166N, V168V, Y206Y, A223A; ii) L121L, L125L, Y126Y, M129A, N166N, V168V, Y206F, A223A; iii) L121L, L125L, Y126Y, M129M, N166Q, V168V, Y206F, A223A; iv) L121L, L125L, Y126Y, M129M, N166S, V168M, Y206F, A223G; and v) L121M, L1251, Y126F, M129A, N166N, V168F, Y206Y, A223A.

[0314] FIGS. 20A and 20B provide a sequence alignment where “*” indicates residues found in all aligned aaRS sequences, “:” indicates residues within strong similarity between the aligned sequences, and “.” indicates residues within some similarity between the aligned sequences. The aaRS may be at least 50%, 60%, 70%, 80%, 90%, 95%, 99%, or 100% identical to any one of SEQ ID NOs: 9-14, wherein the variation is found only in residues not marked with: i) “*”; ii) “*” or “:”, or iii) or “*”, “:”, or “.”.

[0315] 1R26PyIRS, and its variants and derivatives, may paired with the tRNA Methanomethylophilus alvus (Alv) tRNA^{ΔNPyl(8)}.

[0316] Thus, in another aspect of the invention, there is provided AlvtRNA^{ΔNPyl(8)}. AlvtRNA^{ΔNPyl(8)} may have the following sequence: GGGGGACGGTCCGGCGACCAGCGGGTCTNNNAAACCTAGCcttgCGGGGTTCGACaCCCCGGT CTCTCGCCA (SEQ ID NO: 61), wherein the anticodon is the “NNN” triplet.

[0317] In a particular embodiment, AlvtRNA^{ΔNPyl(8)} may have the following sequence:

(SEQ ID NO: 15)
GGGGGACGGTCCGGCGACCAGCGGGTCTCTAAAACCTAGCcttgCGGGGT
TCGACaCCCCGGTCTCTCGCCA.

[0318] AlvtRNA^{ΔNPyl(8)} may be modified to include any anticodon. AlvtRNA^{ΔNPyl(8)}_{CGA} is exemplified herein, but the invention need not be limited in this manner. The tRNA may be at least 80%, 90%, 95%, 99%, or 100% identical to SEQ ID NO: 15 or 61.

[0319] In an aspect of the invention, there is provided a host cell comprising any 1R26PyIRS, or variant or derivative thereof, disclosed herein and any AlvtRNA^{ΔNPyl(8)}, or variant or derivative thereof, disclosed herein, wherein the 1R26PyIRS and AlvtRNA^{ΔNPyl(8)} form an orthogonal aminoacyl-tRNA synthetase-tRNA pair. The host cell may be any suitable for heterologous protein production, in particular the production of polypeptides comprising one or more non-canonical amino acids. The host cell may be a prokaryotic or a eukaryotic cell. The host cell may be a bacterial cell, such as E. coli. The host cell may be a eukaryotic cell, such as a mammalian or insect cell line. The host cell may be a human cell. The host cell may be any bacterium of the invention as disclosed herein.

[0320] 1R26PyIRS and AlvtRNA^{ΔNPyl(8)} are also provided herein in the isolated forms. A molecule is considered to be “isolated”, as used herein, when it is not found in its natural environment (i.e. when it is not expressed as a wild type protein in the cells in which it occurs naturally). A molecule may be isolated and found as part of another composition (e.g. if expressed by a host cell which would not naturally express the molecule).

[0321] Another aaRS disclosed herein is the Archaeoglobus fulgidus tyrosyl-tRNA synthetase (AfTyrRS). AfTyrRS is suitable for use in the prokaryotic cell of the present invention. AfTyrRS may have the following sequence:

(SEQ ID NO: 16)
MDITEKLRLITRNAEEVVTEEELRQLIETKEKPRAYVGYEPSGEIHLGHM
MTVQKLMDLQEAGFEIIVLLADIHAYLNEKGTFEEIAEVADYNKKVFIAL
GLDESRAKFVLGSEYQLSRDYVLDVLKMARITTLNRARRSMDEVSRRKED
PMVSQMIYPLMQALDIAHLGVDLAVGGIDQRKIHMLARENLPRLGYSSPV
CLHTPILVGLDGQKMSSSKGNYISVRDPPEEVERKIRKAYCPAGVVEENP
ILDIAKYHILPRFGKIVVERDAKFGGDVEYASFEELAEDFKSGQLHPLDL
KIAVAKYLNMLLEDARKRLGVSV

[0322] In an embodiment, the synthetase is a variant of AfTyrRS further comprising mutations necessary to allow the recognition of, or to alter the specificity for, a non-canonical amino acid. In particular embodiments, the aaRS may be according to SEQ ID NO: 16, comprising any one or a combination of substitutions at the following residues: Y36, L69, H74, Q116, D165, 1166, or N190. Mutation at the aforementioned residues may be used to generate variants of AfTyrRS with altered selectivity to non-canonical amino acids.

[0323] In another embodiment, the synthetase may be AfTyrRS(p-I-Phe). AfTyrRS(p-I-Phe) may be a mutant of AfTyrRS comprising the following mutations: Y361, L69M, H74L, Q116E, D165T, and I166G, and is suitable for directing the incorporation of p-I-Phe. AfTyrRS(p-I-Phe) may be according to SEQ ID NO: 17.

[0324] In another embodiment, the synthetase may be AfTyrRS(p-Az-Phe). AfTyrRS(p-Az-Phe) may be a mutant of AfTyrRS comprising the following mutations: Y36T, H74L, Q116E, D165T, 1166G, and N190K, and is suitable for directing the incorporation of p-Az-Phe. AfTyrRS(p-Az-Phe) may be according to SEQ ID NO: 18.

[0325] In another embodiment, the synthetase may be AfTyrRS(o-Methyl-Tyrosine). AfTyrRS(o-Methyl-Tyrosine) may be a mutant of AfTyrRS comprising the following mutations: Y36I, H74L, Q116E, D165T, I166G, and is suitable for directing the incorporation of o-Methyl-Tyrosine. AfTyrRS(o-Methyl-Tyrosine) may be according to SEQ ID NO: 19.

[0326] In an embodiment, the aaRS may be at least 50%, 60%, 70%, 80%, 90%, 95%, 99%, or 100% similar or identical to any one of SEQ ID NOs: 16 to 19. The aaRS may be at least 50%, 60%, 70%, 80%, 90%, 95%, 99%, or 100% identical to SEQ ID NO: 16, comprising any one of the following groups: i) Y361, L69M, H74L, Q116E, D165T, 1166G, N190N; ii) Y36T, L69L, H74L, Q116E, D165T, 1166G, N190K; and iii) Y361, L69L, H74L, Q116E, D165T, 1166G, N190N.

[0327] AfTyrRS, and its variants and derivatives, may be paired with the tRNA Af-tRNA^{Tyr(A01)}_{YYY}. Af-tRNA^{Tyr(A01)}_{YYY} may have the following sequence: CCCGCCCTAGCTCAGAGGTAGAGCGTGCTTCTNNNAAAAGCATGGTCCCCGGTTCAAATCCTG GGGGGGGGACCA (SEQ ID NO: 62), wherein the anticodon is the “NNN” triplet.

[0328] In a particular embodiment, Af-tRNA^{Tyr(A01)} may have the following sequence:

(SEQ ID NO: 20)
CCCGCCCTAGCTCAGAGGTAGAGCGTGCTTCTctaAAAAGCATGGTCCCC
GGTTCAAATCCTGGGGGCGGGACCA

[0329] Af-tRNA^{Tyr(A01)}_{YYY} may be modified to include any anticodon. Af-tRNA^{Tyr(A01)}_{CUA} is exemplified herein, but the invention need not be limited in this manner. The tRNA may be at least 80%, 90%, 95%, 99%, or 100% identical to SEQ ID NO: 20 or 62.

[0330] Another aaRS disclosed herein is MmPyIRS. MmPyIRS is an aaRS suitable for use in the prokaryotic cell of the present invention. MmPyIRS may have the following sequence:

(SEQ ID NO: 21)
MDKKPLNTLISATGLWMSRTGTIHKIKHHEVSRSKIYIEMACGDHLVVNN
SRSSRTARALRHHKYRKTCKRCRVSDEDLNKFLTKANEDQTSVKVKVVSA
PTRTKKAMPKSVARAPKPLENTEAAQAQPSGSKFSPAIPVSTQESVSVPA
SVSTSISSISTGATASALVKGNTNPITSMSAPVQASAPALTKSQTDRLEV
LLNPKDEISLNSGKPFRELESELLSRRKKDLQQIYAEERENYLGKLEREI
TRFFVDRGFLEIKSPILIPLEYIERMGIDNDTELSKQIFRVDKNFCLRPM
LAPNLYNYLRKLDRALPDPIKIFEIGPCYRKESDGKEHLEEFTMLNFCQM
GSGCTRENLESIITDFLNHLGIDFKIVGDSCMVYGDTLDVMHGDLELSSA
VVGPIPLDREWGIDKPWIGAGFGLERLLKVKHDFKNIKRAARSESYYNGI
STNL.

[0331] In an embodiment, the synthetase is a variant of MmPyIRS further comprising mutations necessary to allow the recognition of, or alter the specificity for, a non-canonical amino acid. In particular embodiments, the aaRS may be according to SEQ ID NO: 21, comprising any one or a combination of substitutions at the following residues: L301, A302, L305, Y306, L309, N346, C348, Y384, V401, or W417. Mutation at the aforementioned residues may be used to generate variants of MmPyIRS with altered selectivity to non-canonical amino acids.

[0332] The synthetase may be MmPyIRS(Bpa). MmPyIRS(Bpa) may be a mutant of MmPyIRS comprising the mutations A302T, N346T, C348T, and W417C, and is suitable for directing the incorporation of p-Benzoyl-L-phenylalanine (Bpa). MmPyIRS(Bpa) may be according to SEQ ID NO: 22.

[0333] The synthetase may be MmPyIRS(Bta). MmPyIRS(Bta) may be a mutant of MmPyIRS comprising the mutations N346S, C348M, Y384F, and V401G, and is suitable for directing the incorporation of 3-Benzothienyl-L-alanine (Bta). MmPyIRS(Bta) may be according to SEQ ID NO: 23.

[0334] The synthetase may be MmPyIRS(CbzK). MmPyIRS(CbzK) may be a mutant of MmPyIRS comprising the mutations: i) Y306G, or ii) L309A, C348V, Y384F, and is suitable for directing the incorporation of N6-Cbz-L-Lysine (CbzK). MmPyIRS(CbzK) may be according to SEQ ID NO: 24 or SEQ ID NO: 25.

[0335] The synthetase may be MmPyIRS(NMH). MmPyIRS(NMH) may be a mutant of MmPyIRS comprising the mutations L301M, L305I, Y306F, L309A, and C348F, and is suitable for directing the incorporation of 3-N-Methyl-L-histidine (NMH). MmPyIRS (NMH) may be according to SEQ ID NO: 26.

[0336] In other embodiments, the MmPyIRS may be adapted to be suitable for directing the incorporation of Bock, Allock, p-I-Phe, CypK, or AlkK.

[0337] In an embodiment, the aaRS may be at least 50%, 60%, 70%, 80%, 90%, 95%, 99%, or 100% similar or identical to any one of SEQ ID NOs: 21 to 26. The aaRS may be at least 50%, 60%, 70%, 80%, 90%, 95%, 99%, or 100% identical to SEQ ID NO: 21, comprising any one of the following groups: i) L301L, A302T, L305L, Y306Y, L309L, N346T, C348T, Y384Y, V401V, W417C; ii) L301L, A302A, L305L, Y306Y, L309L, N346S, C348M, Y384F, V401G, W417W; iii) L301L, A302A, L305L, Y306G, L309L, N346N, C348C, Y384Y, V401V, W417W, iv) L301L, A302A, L305L, Y306Y, L309A, N346N, C348V, Y384F, V401V, W417W; and v) L301M, A302A, L3051, Y306F, L309A, N346N, C348F, Y384Y, V401V, W417W.

[0338] FIGS. 20A and 20B provide a sequence alignment. The aaRS may be at least 50%, 60%, 70%, 80%, 90%, 95%, 99%, or 100% identical to any one of SEQ ID NOs: 21-26, wherein the variation is found only in residues not marked with: i) “*”; ii) “*” or “:”, or iii) or “*”, “:”, or “.”.

[0339] MmPyIRS, and derivatives, may paired with the tRNA MmtRNA^{Pyl}_{YYY}. MmtRNA^{Pyl}_{YYY} may have the following sequence: GGaAACCTGATCATGTAGATCGAATGGACTNNNAATCCGTTCAGCCGGGTTAGATTCCCGGGG TTTCCGCCA (SEQ ID NO: 63), wherein the anticodon is the “NNN” triplet.

[0340] In an embodiment, the MmtRNA^{Pyl} may have the following sequence:

(SEQ ID NO: 27)
GGaAACCTGATCATGTAGATCGAATGGACTCTAAATCCGTTCAGCCGGGT
TAGATTCCCGGGGTTTCCGCCA.

[0341] MmtRNA^{Pyl}_{YYY} may be modified to include any anticodon. MmtRNA^{Pyl}_{UGA} is exemplified herein, but the invention need not be limited in this manner. The tRNA may be at least 80%, 90%, 95%, 99%, or 100% identical to SEQ ID NO: 27 or 63.

[0342] Another aaRS disclosed herein is M jannaschii tyrosyl-tRNA synthetase (MjTyrRS). MjTyrRS is an aaRS suitable for use in the prokaryotic cell of the present invention. The MjTyrRS may be as disclosed in J. N. Beyer et al. (Journal of Molecular Biology 432, 4690-4704 (2020); incorporated herein by reference).

[0343] MjTyrRS may have the following sequence:

(SEQ ID NO: 28)
MDEFEMIKRNTSEIISEEELREVLKKDEKSAYIGFEPSGKIHLGHYLQIK
KMIDLQNAGFDIIILLADLHAYLNQKGELDEIRKIGDYNKKVFEAMGLKA
KYVYGSEFQLDKDYTLNVYRLALKTTLKRARRSMELIAREDENPKVAEVI
YPIMQVNDIHYLGVDVAVGGMEQRKIHMLARELLPKKVVCIHNPVLTGLD
GEGKMSSSKGNFIAVDDSPEEIRAKIKKAYCPAGVVEGNPIMEIAKYFLE
YPLTIKRPEKFGGDLTVNSYEELESLFKNKELHPMDLKNAVAEELIKILE
PIRKRL.

[0344] In an embodiment, the synthetase is a variant of MjTyrRS further comprising mutations necessary to allow the recognition of, or to alter the specificity for, a non-canonical amino acid. In particular embodiments, the aaRS may be according to SEQ ID NO: 28, comprising any one or a combination of substitutions at the following residues: Y32, L65, H70, F108, Q109, D158, 1159, or L162. Mutation at the aforementioned residues may be used to generate variants of MjTyrRS with altered selectivity to non-canonical amino acids.

[0345] In another embodiment, the synthetase may be MjTyrRS(3-Nitro-Tyr). MjTyrRS(3-Nitro-Tyr) is a mutant of MjTyrRS comprising the mutations Y32H, H70T, D158H, 1159A, and L162R. MjTyrRS (3-Nitro-Tyr) is suitable for directing the incorporation 3-Nitro-Tyr. MjTyrRS(3-Nitro-Tyr) may be according to SEQ ID NO: 29.

[0346] In another embodiment, the synthetase may be MjTyrRS(p-Az-Phe). MjTyrRS(p-Az-Phe) is a mutant of MjTyrRS comprising the mutations Y32L, L65V, F108W, Q109M, D158G, and 1159A. MjTyrRS(p-Az-Phe) is suitable for directing the incorporation p-Az-Phe. MjTyrRS(p-Az-Phe) may be according to SEQ ID NO: 30.

[0347] In an embodiment, the aaRS may be at least 50%, 60%, 70%, 80%, 90%, 95%, 99%, or 100% similar or identical to any one of SEQ ID NOs: 28 to 30. The aaRS may be at least 50%, 60%, 70%, 80%, 90%, 95%, 99%, or 100% identical to SEQ ID NO: 28, comprising any one of the following groups: i) Y32H, L65L, H70T, F108F, Q109Q, D158H, 1159A, L162R; and ii) Y32L, L65V, H70H, F108W, Q109M, D158G, 1159A, L162L.

[0348] MjTyrRS, and derivatives, may paired with the tRNA MjtRNA^{Tyr}_{YYY}. The MIRNA^{Tyr}_{YYY} may be as disclosed in N. Beyer et al. (Journal of Molecular Biology 432, 4690-4704 (2020). MjtRNA^{Tyr}_{YYY} may have the following sequence: CCGGCGGTAGTTCAGCAGGGCAGAACGGCGGACTNNNAATCCGCATGGCAGGGGTTCAAATC CCCTCCGCCGGACCA (SEQ ID NO: 64), wherein the anticodon is the “NNN” triplet.

[0349] In an embodiment, the MitRNATyr may have the following sequence:

(SEQ ID NO: 31)
CCGGCGGTAGTTCAGCAGGGCAGAACGGCGGACTCTAAATCCGCATGGCA
GGGGTTCAAATCCCCTCCGCCGGACCA.

[0350] MitRNA^{Tyr}_{YYY} may be modified to include any anticodon. MitRNA^{Tyr}_{CGA} is exemplified herein, but the invention need not be limited in this manner. The tRNA may be at least 80%, 90%, 95%, 99%, or 100% identical to SEQ ID NO: 31 or 64.

[0351] Another aaRS disclosed herein is Methanomassiliicoccus luminyensis 1 (Lum1) PyIRS. Lum1PyIRS is an aaRS suitable for use in the prokaryotic cell of the present invention. The Lum1PyIRS may have the following sequence:

(SEQ ID NO: 32)
MDTRLTPAQAQRIREMGGTVDPSLAFSSEAERESAFQRISADLQGANLAK
IRRCAEAPERHPIGSLENTLACALAAKGFIEVKTPMMIPADGLVKMGIDE
SHPLWNQVFWVGPKKALRPMLAPNLYFLMRHLRRSVPAPLLLFEIGPCFR
KESRGSNHLEEFTMLNLVELAPQADATERLKEHIATVMNAVGLPYELVVE
GSEVYGTTIDVEVDGVELASGAVGPLPMDKPHGITEPWAGVGFGLERIAL
MRTKEQNIKKVGRSLVYVNGARIDI.

[0352] In an embodiment, the synthetase is a variant of Lum1PyIRS further comprising mutations necessary to allow the recognition of, or to alter the specificity for, a non-canonical amino acid. In particular embodiments, the aaRS may be according to SEQ ID NO: 32, comprising any one or a combination of substitutions at the following residues: L121, L125, Y126, M129, and V168. Mutation at the aforementioned residues may be used to generate variants of Lum 1PyIRS with altered selectivity to non-canonical amino acids.

[0353] The synthetase may be Lum1PyIRS(CbzK). Lum1PyIRS(CbzK) may be a mutant of Lum1PyIRS comprising the mutations Y126G and M129L, and is suitable for directing the incorporation of CbzK. Lum1PyIRS(CbzK) may be according to SEQ ID NO: 33.

[0354] The synthetase may be Lum1PyIRS(NMH). Lum 1PyIRS(NMH) may be a mutant of Lum1PyIRS comprising the mutations L121M, L1251, Y126F, M129A, and V168F, and is suitable for directing the incorporation of 3-N-Methyl-L-histidine (NMH). Lum1PyIRS(NMH) may be according to SEQ ID NO: 34.

[0355] In an embodiment, the aaRS may be at least 50%, 60%, 70%, 80%, 90%, 95%, 99%, or 100% similar or identical to any one of SEQ ID NOs: 32 to 34. The aaRS may be 50%, 60%, 70%, 80%, 90%, 95%, 99%, or 100% identical to SEQ ID NO: 32, comprising any one of the following groups: i) L121L, L125L, Y126G, M129L, V168V; and ii) L121M, L1251, Y126F, M129A, V168F.

[0356] FIGS. 20A and 20B provide a sequence alignment. The aaRS may be at least 50%, 60%, 70%, 80%, 90%, 95%, 99%, or 100% identical to any one of SEQ ID NOs: 32-34, wherein the variation is found only in residues not marked with: i) “*”; ii) “*” or “:”, or iii) or “*”, “:”, or “.”.

[0357] Lum1PyIRS, and derivatives, may paired with the M. intenstinalis tRNAs. Such tRNAs may have the following sequence: GGCGAACTGGTCCGGGACCACCAGGCCTNNNAAGCCACGGTTAGCCGGGTTCAACTCCCGG GTTCGTCGCCA (SEQ ID NO: 65), wherein the anticodon is the “NNN” triplet.

[0358] In an embodiment, the M. intenstinalis tRNA may have the following sequence:

(SEQ ID NO: 66)
GGCGAACTGGTCCGGGACCACCAGGCCTctaAAGCCACGGTTAGCCGGGT
TCAACTCCCGGGTTCGTCGCCA.

[0359] The M. intenstinalis tRNA may be modified to include any anticodon. The tRNA may be at least 80%, 90%, 95%, 99%, or 100% identical to SEQ ID NO: 65 or 66.

[0360] Another aaRS disclosed herein is NitroPyIRS, which is an aaRS from Nitrososphaeria archaeon (NCBI protein accession is HHP52415.1). NitroPyIRS is an aaRS suitable for use in the prokaryotic cell of the present invention. The NitroPyIRS may have the following sequence:

(SEQ ID NO: 35)
MSKIRFTRGQIHRLIELGAEPTELERDFETEAERDKEFNKIAENLARKNL
KNIKDFLEQRRKPLVRVIEEKLRTTALRLGFSEVVTPIIIPRLFIKRMGI
DEGDPLWKQVMLIDDKRALRPMLAPNLYVLMAKLSNIVRPVKIFEIGPCF
RRETGGRYHLEEFTMFNMVELAPEGDPKERLLDYIDTIMRDIGLNYTISV
EPSNVYGETLDVVVNGIEVASAAIGPKPIDANWGVREPWIGVGFGVERLA
MLVGGYNSIARIAKSLSYLDGSTLSVIKLRW.

[0361] In an embodiment, the synthetase is a variant of NitroPyIRS further comprising mutations necessary to allow the recognition of, or to alter the specificity for, a non-canonical amino acid.

[0362] The synthetase may be NitroPyIRS (NMH). NitroPyIRS(NMH) may be a mutant of NitroPyIRS comprising the mutations L123M, L127I, Y128F, M131A, and V169F, and is suitable for directing the incorporation of NMH. NitroPyIRS (NMH) may be according to SEQ ID NO: 36.

[0363] In an embodiment, the aaRS may be at least 50%, 60%, 70%, 80%, 90%, 95%, 99%, or 100% similar or identical to SEQ ID NO: 35 or SEQ ID NO: 36. The aaRS may be at least 50%, 60%, 70%, 80%, 90%, 95%, 99%, or 100% identical to SEQ ID NO: 36, comprising the following substitutions L123M, L127I, Y128F, M131A, and V169F.

[0364] FIGS. 20A and 20B provide a sequence alignment. The aaRS may be at least 50%, 60%, 70%, 80%, 90%, 95%, 99%, or 100% identical to SEQ ID NO: 35 or SEQ ID NO: 36, wherein the variation is found only in residues not marked with: i) “*”; ii) “*” or “:”, or iii) or “*”, “:”, or “.”.

[0365] NitroPyIRS, and derivatives, may paired with the a tRNA derived from Methanohalarchaeum thermophilum. Such tRNAs may have the following sequence:

(SEQ ID NO: 53)
GGGGGGCTGGTCGGGTGGCCAAGGGGGCTCTAAACCCTCGGTTGCCGGGT
TCAACTCCCGGGCTCCCCACCA.

[0366] SEQ ID NO: 53 may be modified to include any anticodon. The tRNA may be at least 80%, 90%, 95%, 99%, or 100% identical to SEQ ID NO: 53.

[0367] Another aaRS disclosed herein is ClosΔNTDPyIRS, which is an aaRS from Clostridiales bacterium (accession no. NLY82529.1). ClosΔNTDPyIRS is an aaRS suitable for use in the prokaryotic cell of the present invention. The ClosΔNTDPyIRS may have the following sequence:

(SEQ ID NO: 37)
MENFTITQTERLKQLNCENDVLELEFEDSEARNSKFREIEIGRVKKGKEN
IKNLLKEKHITISDEVGNKLSDWLMSKDYTKVLTPTIISKDQLKAMTIDE
ENHLFSQVFWIDNNKCLRPMLAPNLYIVMRELKRITNEPVKIFEIGSCFR
KESQGARHMNEFTMLNMVELASVEDGKQLDTLKALAHEAMESLGVESYEL
VIEESAVYGSTLDIEIDGIEVASGSYGPHELDANWDIFDTWVGIGFGIER
LAMAINGGSTIKKYGRSINFIDGETMKL.

[0368] In an embodiment, the synthetase is a variant of ClosΔNTDPyIRS further comprising mutations necessary to allow the recognition of, or to alter the specificity for, a non-canonical amino acid. In particular embodiments, the aaRS may be according to SEQ ID NO: 37, comprising any one or a combination of substitutions at the following residues: Y126, M129, Y208. Mutation at the aforementioned residues may be used to generate variants of ClosΔNTDPyIRS with altered selectivity to non-canonical amino acids.

[0369] The synthetase may be ClosΔNTDPyIRS (CbzK). ClosΔNTDPyIRS (CbzK) may be a mutant of ClosΔNTDPyIRS comprising the mutations: i) Y126G and M129L, or ii) M129A and Y208F, and is suitable for directing the incorporation of CbzK. ClosΔNTDPyIRS (CbzK) may be according to SEQ ID NO: 38 or SEQ ID NO: 39.

[0370] In an embodiment, the aaRS may be at least 50%, 60%, 70%, 80%, 90%, 95%, 99%, or 100% similar or identical to any one of SEQ ID NOs: 37 to 39. The aaRS may be at least 50%, 60%, 70%, 80%, 90%, 95%, 99%, or 100% identical to SEQ ID NO: 37, comprising any one of the following groups: i) Y126G, M129L, and Y208Y, or ii) Y126Y, M129A, or Y208F.

[0371] FIGS. 20A and 20B provide a sequence alignment. The aaRS may be at least 50%, 60%, 70%, 80%, 90%, 95%, 99%, or 100% identical to any one of SEQ ID NOs: 37 to 39, wherein the variation is found only in residues not marked with: i) “*”; ii) “*” or “:”, or iii) or “*”, “:”, or “.”.

[0372] ClosΔNTDPyIRS, and its variants and derivatives, may be paired with a tRNA according to the following sequence:

(ClostRNA; SEQ ID NO: 56)
GGGGAACGGATCGGATGGATCACATAGACTCTAAATCTATGTAGCCGAGT
GAAACTCTCGGGTTCCTCGCCA

[0373] ClostRNA may be modified to include any anticodon. The tRNA may be at least 80%, 90%, 95%, 99%, or 100% identical to SEQ ID NO: 56.

[0374] Another aaRS disclosed herein is an aaRS derived from Methanonatronarchaeum thermophilum (TronΔNTDPyIRS). TronΔNTDPyIRS is an aaRS suitable for use in the prokaryotic cell of the present invention. The TronΔNTDPyIRS may have the following sequence:

(SEQ ID NO: 40)
MEFTVTQKQRLQELGFEGVFPSDFEDVDERNRFFEELVGRLRDRNRKRFE
RLVGNKIPFWRKVSSDLRNRFYELGFVEVRTPEIISYSLLEKMEISDDLR
EQVYWLEEDNRCLRPMLAPNLYNELRHFNRISNQSKVRIFEIGTCFRREK
SSSEHLNEFTMLNAVEMGDIGDTEERLDRLIEEVFGEFTDYKKVGEESSL
YGKTVDVLVDGVEVASCIAGPHPLDSNWSIDQPWVGIGLGVERLAMLLDD
GSTAKAYGNSYIYQDGVRLDIK.

[0375] In an embodiment, the synthetase is a variant of TronΔNTDPyIRS further comprising mutations necessary to allow the recognition of, or to alter the specificity for, a non-canonical amino acid.

[0376] In an embodiment, the aaRS may be at least 50%, 60%, 70%, 80%, 90%, 95%, 99%, or 100% similar or identical to SEQ ID NO: 40.

[0377] FIGS. 20A and 20B provide a sequence alignment. The aaRS may be at least 50%, 60%, 70%, 80%, 90%, 95%, 99%, or 100% identical to SEQ ID NO: 40, wherein the variation is found only in residues not marked with: i) “*”; ii) “*” or “:”, or iii) or “*”, “:”, or “.”.

[0378] TronΔNTDPyIRS, and its variants and derivatives, may be paired with a tRNA according to the following sequence:

(TrontRNA; SEQ ID NO: 52)
GGGGGGCTGGTCGGGGTGACCACGGAGGCTCTAAACCTCCCTTAGCCGGG
TTCAACTCCCGGGTCCCTCGCCA.

[0379] TrontRNA may be modified to include any anticodon. The tRNA may be at least 80%, 90%, 95%, 99%, or 100% identical to SEQ ID NO: 52.

[0380] Another aaRS disclosed herein is GemmΔNTDPyIRS, which is an aaRS from Gemmatimonadetes bacterium (accession no. NNM03691.1). GemmΔNTDPyIRS is an aaRS suitable for use in the prokaryotic cell of the present invention. The GemmΔNTDPyIRS may have the following sequence:

(SEQ ID NO: 41)
MGITWSKTQKDRLRALRADGARLADSFEGRPQRDQAFQDLEGALAKARRK
ELEDLRAGHGRPGLCRLQTTLEGTLVGAGFVQVATPTIMSRGLLAKMGVT
KNHDLFEQVFWLDRDRCLRPMLAPHLYYVIKDLLRLWEKPLGIFEVGSCF
RKDSQGARHSNEFTMLNLCEFGLPEEDRGGRLREMAEVVTRAAGVHEYEL
EESASTVYGGTLDVVSVDGLELGSGAMGPHPLDHAWRITDTWVGIGFGLE
RLLMTVNRETSIGKMGRSLAYLDGIPLSI.

[0381] In an embodiment, the synthetase is a variant of GemmΔNTDPyIRS further comprising mutations necessary to allow the recognition of, or to alter the specificity for, a non-canonical amino acid.

[0382] In an embodiment, the aaRS may be at least 50%, 60%, 70%, 80%, 90%, 95%, 99%, or 100% similar or identical to SEQ ID NO: 41.

[0383] FIGS. 20A and 20B provide a sequence alignment. The aaRS may be at least 50%, 60%, 70%, 80%, 90%, 95%, 99%, or 100% identical to SEQ ID NO: 41, wherein the variation is found only in residues not marked with: i) “*”; ii) “*” or “:”, or iii) or “*”, “:”, or “.”.

[0384] GemmΔNTDPyIRS, and derivatives, may paired with the tRNA GemmtRNA. The GemmtRNA may have the following sequence:

(SEQ ID NO: 46)
GGGGAGTGGATCGATACAAGATCGTGTGGGCTCTAAACCCACATAGCTCG
GTGTGACTCCGGGGCTCCCCACCA

[0385] GemmtRNA may be modified to include any anticodon. The tRNA may be at least 80%, 90%, 95%, 99%, or 100% identical to SEQ ID NO: 46.

[0386] Another aaRS disclosed herein is PGA8ΔNTDPyIRS, which is an aaRS from Peptostreptococcaceae bacterium pGA-8 (accession no. SFE25427.1). PGA8ΔNTDPyIRS is an aaRS suitable for use in the prokaryotic cell of the present invention. The PGA8ΔNTDPyIRS may have the following sequence:

(SEQ ID NO: 42)
MQYSNTQRERLVQLNIDASLLEATFEDAEARDASFRSLEKELAKKAKTHL
RSLLSSDAVTGSQAVGNTLCSWLQQKGFTRVDTPTIISDKMLDKMSIDDK
HHLREQVFWIDRHKCLRPMLAPNLYIVMRELKKTLNTPVKIFEMGSCFRK
ESQGARHMNEFTMLNFVELATVKDGEQKEYLEKMAREAMAALKIDDYELI
IEESTVYGTTVDIEIDGIEVASGAYGPHELDSAWAVFDTWVGIGFGIERL
AMAMNGGKTIKRFGRSTNYLDGVPISL.

[0387] In an embodiment, the synthetase is a variant of PGA8ΔNTDPyIRS further comprising mutations necessary to allow the recognition of, or to alter the specificity for, a non-canonical amino acid.

[0388] In an embodiment, the aaRS may be at least 50%, 60%, 70%, 80%, 90%, 95%, 99%, or 100% similar or identical to SEQ ID NO: 42.

[0389] FIGS. 20A and 20B provide a sequence alignment. The aaRS may be at least 50%, 60%, 70%, 80%, 90%, 95%, 99%, or 100% identical to SEQ ID NO: 42, wherein the variation is found only in residues not marked with: i) “*”; ii) “*” or “:”, or iii) or “*”, “:”, or “.”.

[0390] PGA8ΔNTDPyIRS, and variants and derivatives, may paired with the tRNA PGA8tRNA. The PGA8RNA may have the following sequence:

(SEQ ID NO: 54)
GGGGAGTGGATCGTATTGATCGTATGGACTCTAAATCCATAAAGCCGAGT
GAGACTCTCGGACTCCTCGCCA.

[0391] PGA8tRNA may be modified to include any anticodon. The tRNA may be at least 80%, 90%, 95%, 99%, or 100% identical to SEQ ID NO: 54.

[0392] Another aaRS disclosed herein is I2ΔNTDPyIRS, which is an aaRS from Desulfosporosinus sp. 12 (accession no. WP_045576271.1). I2ΔNTDPyIRS is an aaRS suitable for use in the prokaryotic cell of the present invention. The I2ΔNTDPyIRS may have the following sequence:

(SEQ ID NO: 43)
MGIIWTPIQKQRLQELNASEAQREMCFESQQARDRAFQEQEHSLVVEGKR
RLMELRDIKRRPSLSVLEQQLVEALTQQGFVQVVTPTIISKTSLAKMSVS
DDHPLFSQVFWLDSKRCLRPMLAPNLYTLWKDLLRLWEKPIRIFEIGTCY
RKESKGSLHLNEFTMLNLTELGLPEDQRHQRLEELASLVMETVGIADYEM
ELTTSVVYGDTLDVVKGIELGSSAMGPHPLDDQWGIIDPWVGIGFGLERL
LMIKEGSQNVQSMGRSLTYLNGVRLNI.

[0393] In an embodiment, the synthetase is a variant of I2ΔNTDPyIRS further comprising mutations necessary to allow the recognition of, or to alter the specificity for, a non-canonical amino acid.

[0394] In an embodiment, the aaRS may be at least 50%, 60%, 70%, 80%, 90%, 95%, 99%, or 100% similar or identical to SEQ ID NO: 43.

[0395] FIGS. 20A and 20B provide a sequence alignment. The aaRS may be at least 50%, 60%, 70%, 80%, 90%, 95%, 99%, or 100% identical to SEQ ID NO: 43, wherein the variation is found only in residues not marked with: i) “*”; ii) “*” or “:”, or iii) or “*”, “:”, or “.”.

[0396] I2ΔNTDPyIRS, and derivatives, may paired with any of the following tRNAs:

(I2CUAG; SEQ ID NO: 47)
GGGGGGTAGATCGGATTGATCGCGTGGACTCTAAATCCGCGCTAGACGGG
TGAAACTCCCGTACTCCTCGCCA
(I2b8; SEQ ID NO: 48)
GGGGCGTCGATCGGATTGATCGCGTGGACTCTAAATCCGCGCGCAACGGG
TGAAACTCCCGTACGCCTCGCCA
(I2b32; SEQ ID NO: 49)
GGGGTGTTGATCGGATTGATCGCGTGGACTCTAAATCCGCGGTAGACGGG
TGAAACTCCCGTACACCTCACCA
(I2b72; SEQ ID NO: 50)
GGGGTGTAGATCGGATTGATCGCGTGGACTCTAAATCCGCGAACAACGGG
TGAAACTCCCGTACACCTCGCCA
(I2H52; SEQ ID NO: 51)
GGGGCGTTGATCGGATTGATCGCGTGGACTCTAAATCCGCGGCCGACGGG
TGAAACTCCCGTACACCTCTCCA
(I2; SEQ ID NO: 55)
GGGGGGTAGATCGGATTGATCGCGTGGACTCTAAATCCGCGTAGACGGGT
GAAACTCCCGTACTCCTCGCCA

[0397] SEQ ID NOs: 47 to 51 and 55 may be modified to include any anticodon. The tRNA may be at least 80%, 90%, 95%, 99%, or 100% identical to any one of 47 to 51 and 55.

[0398] Another aaRS disclosed herein is D121ΔNTDPyIRS, which is an aaRS from a Deltaproteobacteria (accession no. RLC04121.1). D121ΔNTDPyIRS is an aaRS suitable for use in the prokaryotic cell of the present invention. The D121ΔNTDPyIRS may have the following sequence:

(SEQ ID NO: 44)
MIPWTQTQTQRLNELNAPDSALKKSFDGEPAREKAYQALEKSLVTTQRRR
LAEFQTTHRRPELCRLENKLAEMLTQDGFAQVTTPIIMSRGLLKKMSIDS
KHPLNSQIFWLQEDKCLRPMLAPHLYYLLVDLLRIWKRPVRIFEIGPCFR
KESRGSKHASEFTMLNLVEMGTPENTRRERIQDVGSRVATAAGVKNYRFE
TVTSEIYGDTIDIVAGKDGLEIASAAMGPHPLDRPWKINESWIGIGFGLE
RLLMASHRSRNLARFGRSLAYLDGVRLNI.

[0399] In an embodiment, the synthetase is a variant of D121ΔNTDPyIRS further comprising mutations necessary to allow the recognition of, or to alter the specificity for, a non-canonical amino acid.

[0400] In an embodiment, the aaRS may be at least 50%, 60%, 70%, 80%, 90%, 95%, 99%, or 100% similar or identical to SEQ ID NO: 44.

[0401] FIGS. 20A and 20B provide a sequence alignment. The aaRS may be at least 50%, 60%, 70%, 80%, 90%, 95%, 99%, or 100% identical to SEQ ID NO: 44, wherein the variation is found only in residues not marked with: i) “*”; ii) “*” or “:”, or iii) or “*”, “:”, or “.”.

[0402] D121ΔNTDPyIRS, and derivatives, may paired with the following tRNA:

(SEQ ID NO: 57)
GGGGGGTGGATCGTAATGAGATCGTGTGGACTCTAAATCCACATAGACGG
GTGCAACTCCCGTACTCCCCGCCA

[0403] SEQ ID NO: 57 may be modified to include any anticodon. The tRNA may be at least 80%, 90%, 95%, 99%, or 100% identical to SEQ ID NO: 57.

[0404] Another aaRS disclosed herein is D416ΔNTDPyIRS, which is an aaRS from a Deltaproteobacteria (accession no. RTZ99416.1). D416ΔNTDPyIRS is an aaRS suitable for use in the prokaryotic cell of the present invention. The D416ΔNTDPyIRS may have the following sequence:

(SEQ ID NO: 45)
MNSSWTEVQRHRLKELNGAEKDLETAFGDDLQRNRAFQKLEKQLVYQERK
RLDRLLDTRFRPLRCELESLLIDALKCEGFTRVETPTIISQNDLERMSID
RSHPFNDQVYRVDSKHCLRPMLAPGLYRLMKDLARIRSGKPVRIFEIGPC
FRKETSGARHAGEFTMLNLVEMRIEKGSRRFRIETLAKRIMHAAGIDTYD
LVDEPSEVYNTTLDIVCGSDPLEVASCAMGPHPLDAAWGIIDTWVGLGFG
LERLLMARENSPGIGKWCKSVSYLDGIRLTL.

[0405] In an embodiment, the synthetase is a variant of D416ΔNTDPyIRS further comprising mutations necessary to allow the recognition of, or to alter the specificity for, a non-canonical amino acid.

[0406] In an embodiment, the aaRS may be at least 50%, 60%, 70%, 80%, 90%, 95%, 99%, or 100% similar or identical to SEQ ID NO: 45.

[0407] FIGS. 20A and 20B provide a sequence alignment. The aaRS may be at least 50%, 60%, 70%, 80%, 90%, 95%, 99%, or 100% identical to SEQ ID NO: 45, wherein the variation is found only in ‘. “:”, or “.”. residues not marked with: i) “*”; ii) “*” or “:”, or iii) or “*”, “:”

[0408] D416ΔNTDPyIRS, and derivatives, may paired with the following tRNA:

(SEQ ID NO: 58)
GGGGAGTGGATCGGATGAGATCGCATGGGCTCTAAACCCATGTAGCCGGG
TGCGACTCCCGGGCTTCCCTCCA

[0409] SEQ ID NO: 58 may be modified to include any anticodon. The tRNA may be at least 80%, 90%, 95%, 99%, or 100% identical to SEQ ID NO: 58.

[0410] In particular embodiments, any of the aaRSs disclosed herein may be modified to allow the recognition of, or to alter the specificity for, any of Allock, AlkK, Bock, Bta, CbzK, CypK, 3-Nitro-Tyr, NMH, p-I-Phe, and p-Az-Phe, and o-Methyl-Tyrosine.

[0411] In an aspect of the invention, there is provided a host cell comprising any aaRS, or variant or derivative thereof, disclosed herein and any tRNA, or variant or derivative thereof, disclosed herein, wherein the aaRS and tRNA form an orthogonal aminoacyl-tRNA synthetase-tRNA pair. The host cell may be any suitable for heterologous protein production, in particular the production of polypeptides comprising one or more non-canonical amino acids. The host cell may be a prokaryotic or a eukaryotic cell. The host cell may be a bacterial cell, such as E. coli. The host cell may be a eukaryotic cell, such as a mammalian or insect cell line. The host cell may be a human cell. The host cell may be any bacterium of the invention as disclosed herein.

[0412] The aaRSs and tRNAs are also provided herein in the isolated forms.

[0413] The present inventors provide data herein demonstrating that the following orthogonal tRNA synthetase-tRNA pairs may be used in any combination of two or three pairs: i) MmPyIRS/MmtRNA^{Pyl}_{YYY}; ii) 1R26PyIRS/AlVERNA^{ΔNPyl(8)}_{YYY}; iii) and AfTyrRS/Af-tRNA^{Tyr(A01)}_{YYY}.

[0414] Thus, in an aspect of the invention, there is provided a host cell comprising: any one, two, or three orthogonal tRNA synthetase-tRNA pairs selected from the group: i) MmPyIRS/MmtRNA^{Pyl}_{YYY}; ii) 1R26PyIRS/AlvtRNA^{ΔNPyl(8)}_{YYY}; iii) and AfTyrRS/Af-tRNA^{Tyr(A01)}_{YYY}. The aaRSs may be modified to allow the recognition of or alter the specificity for a non-canonical amino acid. The aaRSs may be any of the variants disclosed herein. The tRNAs may be any of the variants disclosed herein.

[0415] The present inventors provide data herein demonstrating that the following orthogonal tRNA synthetase-tRNA pairs may be used in any combination of two or three pairs: i) MmPyIRS/MmtRNA^{Pyl}_{YYY}; ii) 1R26PyIRS/AlvtRNA^{ΔNPyl(8)}_{YYY}; iii) and MjTyrRS/MjtRNA^{Tyr}_{YYY}.

[0416] Thus, in an aspect of the invention, there is provided a host cell comprising: any one, two, or three orthogonal tRNA synthetase-tRNA pairs selected from the group: i) MmPyIRS/MmtRNA^{Pyl}_{YYY}; ii) 1R26PyIRS/AlvtRNA^{ΔNPyl(8)}_{YYY}; iii) and MjTyrRS/MjtRNA^{Tyr}_{YYY}. The aaRSs may be modified to allow the recognition of or alter the specificity for a non-canonical amino acid. The aaRSs may be any of the variants disclosed herein. The tRNAs may be any of the variants disclosed herein.

[0417] In another aspect of the invention, there is provided a host cell comprising any one, two, or three orthogonal tRNA synthetase-tRNA pairs selected from the group: i) a class A ΔNPyIRS/^{ΔNPyl}tRNA pair; ii) a class B ΔNPyIRS/^{ΔNPyl}tRNA pair; and iii) an MmPyIRS/Spe^{Pyl}tRNA pair. The classes of aaRS and tRNA are as described in Dunkelmann et al. (Engineered triply orthogonal pyrrolysyl-tRNA synthetase/tRNA pairs enable the genetic encoding of three distinct non-canonical amino acids, 2020).

[0418] The orthogonal tRNA synthetase-tRNA pairs may be expressed in a host cell. The host cell may be any suitable for heterologous protein production, in particular the production of polypeptides comprising one or more non-canonical amino acids. The host cell may be a prokaryotic or a eukaryotic cell. The host cell may be a bacterial cell, such as E. coli. The host cell may be a eukaryotic cell, such as a mammalian or insect cell line. The host cell may be a human cell. The host cell may be any bacterium of the invention as disclosed herein.

[0419] There is provided herein a bacterium that comprises a genome which comprises a polynucleotide sequence that is at least 80%, 85%, 90%, 95%, 98%, 99%, 99.5%, 99.8%, 99.9%, or 100% identical to SEQ ID NO: 8, and wherein the bacterium comprises a first orthogonal aminoacyl-tRNA synthetase-tRNA pair capable of decoding the sense codon TCG, a second orthogonal aminoacyl-tRNA synthetase-tRNA pair capable of decoding the sense codon TCA, and a third orthogonal aminoacyl-tRNA synthetase-tRNA pair capable of decoding the stop codon TAG. The calculation of the sequence identity of the genome should exclude the sequences required for expression of the orthogonal aminoacyl-tRNA synthetase-tRNA pairs (i.e. the bacterium may be of the strain Syn61Δ3(ev5), further modified to express the orthogonal aminoacyl-tRNA synthetase-tRNA pairs). In an embodiment, the orthogonal tRNA synthetase-tRNA pairs are: i) MmPyIRS/MmtRNA^{Pyl}_{YYY}; ii) 1R26PyIRS/AlvtRNA^{ΔNPyl(8)}_{YYY}; and iii) and AfTyrRS/Af-tRNA^{Tyr(A01)}_{CUA}, wherein the MmtRNA^{Pyl}_{YYY} may be MmtRNA^{Pyl}_{UGA}, the 1R26PyIRS may be 1R26PyIRS(CbzK), the AlvtRNA^{ΔNPyl(8)}_{YYY} may be AlvtRNA^{ΔNPyl(8)}_{CGA}, and the AfTyrRS may be AfTyrRS(p-I-Phe). In another embodiment, the orthogonal tRNA synthetase-tRNA pairs are: i) MmPyIRS/MmtRNA^{Pyl}_{YYY}; ii) 1R26PyIRS/AlvtRNA^{ΔNPyl(8)}_{YYY}; iii) and MjTyrRS/MitRNA^{Tyr}_{CUA}, wherein the MmtRNA^{Pyl}_{YYY} may be MmtRNA^{Pyl}_{UGA}, the 1R26PyIRS may be 1R26PyIRS(CbzK), the AlvtRNA^{ΔNPyl(8)}_{YYY} may be AlvtRNA^{ΔNPyl(8)}_{CGA}, and the MjTyrRS may be MjTyrRS(3-Nitro-Tyr) or MjTyrRS(p-Az-Phe).

[0420] The substrate of the orthogonal tRNA synthetases that are expressed in prokaryotic cell of the invention may be any non-canonical amino acid. Hence, the prokaryotic cell of the invention may be used to generate polymers comprising a first non-canonical amino acid, a second non-canonical amino acid, and optionally a third non-canonical amino acid.

[0421] As used herein, the term “non-canonical amino acid” means any amino acid excluding L-alanine, L-cysteine, L-aspartic acid, L-glutamic acid, L-phenylalanine, glycine, L-histidine, L-isoleucine, L-lysine, L-leucine, L-methionine, L-asparagine, L-proline, L-glutamine, L-arginine, L-serine, L-threonine, L-valine, L-tryptophan, and L-tyrosine.

[0422] The non-canonical amino acid may be an unnatural amino acid. As used herein, an “unnatural amino acid” is any amino acid that is not naturally encoded or found in the genetic code. Such amino acids may be non-proteinogenic amino acids. Thus, an unnatural amino acid may be any amino acid excluding L-alanine, L-cysteine, L-aspartic acid, L-glutamic acid, L-phenylalanine, glycine, L-histidine, L-isoleucine, L-lysine, L-leucine, L-methionine, L-asparagine, L-proline, L-glutamine, L-arginine, L-serine, L-threonine, L-valine, L-tryptophan and L-tyrosine, L-pyrrolysine, and L-selenocysteine.

[0423] The non-canonical amino acids that are suitable for use with the present invention are not particularly limited. Suitable non-canonical amino acids will be well known to those of skill in the art, for example those disclosed in Neumann, H., 2012. FEBS letters, 586 (15), pp. 2057-2064; and Liu, C. C. and Schultz, P. G., 2010. Annual review of biochemistry, 79, pp. 413-444 (herein incorporated by reference). In some embodiments the non-canonical amino acids are selected from one or more of: p-Acetylphenylalanine, m-Acetylphenylalanine, O-allyltyrosine, Phenylselenocysteine, selenocysteine, p-Propargyloxyphenylalanine, p-Azidophenylalanine, p-Boronophenylalanine, O-methyltyrosine, p-Aminophenylalanine, p-Cyanophenylalanine, m-Cyanophenylalanine, p-Fluorophenylalanine, p-lodophenylalanine, p-Bromophenylalanine, p-Nitrophenylalanine, L-DOPA, 3-Aminotyrosine, 3-lodotyrosine, p-Isopropylphenylalanine, 3-(2-Naphthyl) alanine, Biphenylalanine, Homoglutamine, D-tyrosine, p-Hydroxyphenyllactic acid, 2-Aminocaprylic acid, Bipyridylalanine, HQ-alanine, p-Benzoylphenylalanine, o-Nitrobenzylcysteine, o-Nitrobenzylserine, 4,5-Dimethoxy-2-nitrobenzylserine, o-Nitrobenzyllysine, o-Nitrobenzyltyrosine, 2-Nitrophenylalanine, Dansylalanine, p-Carboxymethylphenylalanine, 3-Nitrotyrosine, Sulfotyrosine, Acetyllysine, Methylhistidine, 2-Aminononanoic acid, 2-Aminodecanoic acid, Pyrrolysine, Cbz-lysine, Boc-lysine, Allyloxycarbonyllysine, N^{ε}-((tert-butoxy) carbonyl)-L-lysine (Bock), Nε-(carbobenzyloxy)-L-lysine (CbzK), N^{ε}-allyloxycarbonyl-L-lysine (AllocK), (S)-2-Amino-3-(4-iodophenyl)propanoic acid (p-I-Phe), CypK, AlkK, 3-Nitro-Tyr, and p-Az-Phe. The first, second, and third non-canonical amino acid may be any combination of the aforementioned non-canonical amino acids.

[0424] In particular embodiments, the non-canonical amino acid may be any one of Bock, CbzK, Allock, p-I-Phe, CypK, AlkK, 3-Nitro-Tyr, and p-Az-Phe (see FIGS. 14A-14C). The first, second, and third non-canonical amino acid may be any combination of Bock, CbzK, Allock, p-I-Phe, CypK, AlkK, 3-Nitro-Tyr, and p-Az-Phe.

### Uses of the Prokaryotic Cells of the Invention

[0425] The prokaryotic cells of the invention may be used to synthesise polymers or proteins that include a first, second, and/or third non-canonical amino acid. In particular embodiments, the prokaryotic cells of the invention may be used to synthesise polymers or proteins that include two or three different types of non-canonical amino acid. The non-canonical amino acids may be any as disclosed herein.

[0426] Thus, in an aspect of the invention, there is provided a method of synthesising a polymer, comprising:
[0427] i) providing a prokaryotic cell of the invention, wherein the prokaryotic cell comprises a first orthogonal aminoacyl-tRNA synthetase-tRNA pair; and contacting said prokaryotic cell with a nucleic acid sequence encoding a polymer, said nucleic acid sequence comprising the first type of sense codon;
[0428] ii) incubating the prokaryotic cell in the presence of a first non-canonical amino acid, wherein the first non-canonical amino acid is a substrate for the first orthogonal aminoacyl-tRNA synthetase; and
[0429] iii) incubating the prokaryotic cell to allow incorporation of the first non-canonical amino acid into the polymer via the first orthogonal aminoacyl-tRNA synthetase-tRNA pair.

[0430] In a particular embodiment, there is provided a method of synthesising a polymer, comprising:
[0431] i) providing a prokaryotic cell of the invention, wherein the prokaryotic cell comprises first and second orthogonal aminoacyl-tRNA synthetase-tRNA pairs; and contacting said prokaryotic cell with a nucleic acid sequence encoding a polymer, said nucleic acid sequence comprising the first type of sense codon and/or the second type of sense codon;
[0432] ii) incubating the prokaryotic cell in the presence of a first and a second non-canonical amino acid, wherein the first non-canonical amino acid is a substrate for the first orthogonal aminoacyl-tRNA synthetase and the second non-canonical amino acid is a substrate for the second orthogonal aminoacyl-tRNA synthetase; and
[0433] iii) incubating the prokaryotic cell to allow incorporation of the first non-canonical amino acid into the polymer via the first orthogonal aminoacyl-tRNA synthetase-tRNA pair and the incorporation of the second non-canonical amino acid into the polymer via the second first orthogonal aminoacyl-tRNA synthetase-tRNA pair.

[0434] In an embodiment, there is provided a method of synthesising a polymer, comprising: i) providing a prokaryotic cell of the invention, wherein the prokaryotic cell comprises first, second, and third orthogonal aminoacyl-tRNA synthetase-tRNA pairs; and contacting said prokaryotic cell with a nucleic acid sequence encoding a polymer, said nucleic acid sequence comprising a first type of sense codon, a second type of sense codon, and/or a first type of stop codon;
[0435] ii) incubating the prokaryotic cell in the presence of a first, a second, and a third non-canonical amino acid, wherein the first non-canonical amino acid is a substrate for the first orthogonal aminoacyl-tRNA synthetase, the second non-canonical amino acid is a substrate for the second orthogonal aminoacyl-tRNA synthetase, and the third non-canonical amino acid is a substrate for the third orthogonal aminoacyl-tRNA synthetase;
[0436] iii) incubating the prokaryotic cell to allow incorporation of the first non-canonical amino acid into the polymer via the first orthogonal aminoacyl-tRNA synthetase-tRNA pair, incorporation of the second non-canonical amino acid into the polymer via the second first orthogonal aminoacyl-tRNA synthetase-tRNA pair, and/or incorporation of the third non-canonical amino acid into the polymer via the third first orthogonal aminoacyl-tRNA synthetase-tRNA pair.

[0437] The contacting of the prokaryotic cell with the nucleic acid sequence may take any form that would provide the nucleic acid to the prokaryotic cell such that the nucleic acid sequence may be decoded to produce a polymer, such as a protein.

[0438] The prokaryotic cells for use in the present method may be any as described herein, wherein the prokaryotic cells comprise first and, optionally, second orthogonal aminoacyl-tRNA synthetase-tRNA pairs and, optionally, the third orthogonal aminoacyl-tRNA synthetase-tRNA pair. For instance, in an embodiment, the prokaryotic cell for use in the present method is a prokaryotic cell that does not express a first endogenous tRNA, a second endogenous tRNA, and a first endogenous release factor; and wherein a first type of sense codon and a second type of sense codon have been recoded within the genome of the prokaryotic cell such that the first endogenous tRNA and the second endogenous tRNA are dispensable, and a first type of stop codon has been recoded within the genome of the prokaryotic cell such that the first endogenous release factor is dispensable. The nature of the recoding may be as described for any prokaryotic cell of the invention disclosed herein. The first orthogonal tRNA is capable of decoding the first type of sense codon, the second orthogonal tRNA is capable of decoding the second type of sense codon, and the third orthogonal tRNA is capable of decoding the first type of stop codon. The prokaryotic cell may be E. coli.

[0439] In a particular embodiment, the prokaryotic cell for use in the present method is an E. coli cell that does not express tRNA^{Ser}_{UGA}, tRNA^{Ser}_{CGA}, or RF-1, occurrences of the sense codon TCA have been recoded such that tRNA^{Ser}_{UGA} is dispensable (e.g. occurrences of TCA in essential genes of the parent strain have been replaced with AGT), occurrences of the sense codon TCG have been recoded such that tRNA^{Ser}_{CGA} is dispensable (e.g. occurrences of TCG in essential genes of the parent strain have been replaced with AGC), and occurrences of the stop codon TAG have been recoded such that RF-1 is dispensable (e.g. occurrences of TAG in essential genes of the parent strain have been replaced with TAA). The bacterium has been modified to include first, second, and third orthogonal aminoacyl-tRNA synthetase-tRNA pairs capable of decoding the TCA, TCG, and TAG codons and capable of incorporating a first, second, and third non-canonical amino acid into such sites during polymer formation.

[0440] In particular embodiments, the prokaryotic cell for use in the present method is Syn61Δ3, Syn61Δ3(ev3), Syn61Δ3(ev4), or Syn61Δ3(ev5). As such, the prokaryotic cell may comprise a genome which is at least 80%, 85%, 90%, 95%, 98%, 99%, 99.5%, 99.8%, 99.9%, or 100% identical to any one of: SEQ ID NOs: 5 to 8. The calculation of the sequence identity percentage excludes any sequence that has been inserted to enable the expression of the orthogonal aminoacyl-tRNA synthetase-tRNA pairs.

[0441] The orthogonal tRNA synthetase-tRNA pairs may be any as described herein.

[0442] In particular embodiments the orthogonal tRNA synthetase-tRNA pairs are: MmPyIRS/MmtRNA^{Pyl}_{YYY}; 1R26PyIRS/AlVERNA^{ΔNPyl(8)}_{YYY}; and AfTyrRS/Af-tRNA^{Tyr(A01)}_{YYY}. The MmtRNA^{Pyl}_{YYY} may be MmtRNA^{Pyl}_{UGA}. The 1R26PyIRS may be 1R26PyIRS(CbzK). The AlvtRNA^{ΔNPyl(8)}_{YYY} may be AlVERNA^{ΔNPyl(8)}_{CGA}. The AfTyrRS may be AfTyrRS(p-I-Phe). The Af-tRNA^{Tyr(A01)}_{YYY} may be Af-tRNA^{Tyr(A01)}_{CUA}.

[0443] In other embodiments the orthogonal tRNA synthetase-tRNA pairs are: MmPyIRS/MmtRNA^{Pyl}_{YYY}; 1R26PyIRS/AlvtRNA^{ΔNPyl(8)}_{YYY}; and MjTyrRS/MjtRNA^{Tyr}_{YYY}. The MmtRNA^{Pyl}_{YYY} may be MmtRNA^{Pyl}_{UGA}. The 1R26PyIRS may be 1R26PyIRS(CbzK). The AlvtRNA^{ΔNPyl(8)}_{YYY} may be AlvtRNA^{ΔNPyl(8)}_{CGA}. The MjTyrRS may be MjTyrRS (3-Nitro-Tyr) or MjTyrRS (p-Az-Phe). The MjtRNA^{Tyr}_{YYY} may be MjtRNA^{Tyr}_{CUA}.

[0444] FIG. 10 presents data relating to the use of Syn61Δ3(ev5) to create proteins containing an ncAA in response to a sense codon or stop codon. As a control, MDS42 cells were also used create proteins containing a ncAA in response to a stop codon. As can be seen from this figure, the yield of the reporter protein containing an ncAA incorporated in response to an amber codon (as a ratio compared to wt) was vastly improved for Syn61Δ3(ev5) over the control. As such, the presently disclosed prokaryotic cells and methods of using said prokaryotic cells are surprising improvements over the prior art, even where producing the same product.

[0445] Further data relating to protein yields are provided in Table 1 (Data file S4).

[0446] Prokaryotic cells, e.g. E. coli, are not typically able to incorporate most eukaryotic post-translational modifications, such as ubiquitination, glycosylation and phosphorylation, nor are they typically capable of other eukaryotic maturation processes, and proteolytic protein maturation. In addition, correct disulphide bond formation and lipolysaccharide contaminations can be troublesome (see Ovaa, H., 2014. Frontiers in chemistry, 2, p.15). However, therapeutic proteins, such as antibodies, enzymes and cytokines commonly carry post-translational modifications and disulphide bonds, and often require proteolytic maturation to attain their correctly folded state. Thus, the majority of therapeutic proteins are produced in eukaryotic and mammalian cell systems. However, expression in prokaryotic cells e.g. E. coli is in general cheaper, more susceptible to genetic modifications, and versatile with regard to mutant library development, and suitable for industrial scale fermentation (Ovaa, H., 2014. Frontiers in chemistry, 2, p.15).

[0447] Thus, in some embodiments the synthesised polymers are therapeutic polypeptides, optionally wherein mammalian protein modifications have been introduced via one or more non-canonical amino acids. The synthesised polymer may be a protein, such as a therapeutic protein, comprising at least three distinct types of non-canonical amino acid.

[0448] Experimental data are provided herein that indicate that the prokaryotic cells of the invention may be used to generate polymers containing first, second and third non-canonical amino acids, each of which may differ from the others. Surprisingly, the inventors show that polymers may be produced that contain non-canonical amino acids that are directly adjacent to each other. In fact, the polymers may even contain only non-canonical amino acids. While it was known that ribosomes were able to tolerate one non-canonical amino acid at a time, it has never been shown that two non-canonical amino acids simultaneously within the same ribosome would allow productive peptide synthesis. As discussed in the Examples, for a linear polymer composed of two distinct monomers (A and B) there are four elementary polymerization steps (A+B->AB, B+A->BA, A+A->AA, B+B ->BB) from which any sequence can be composed (FIG. 5A). For ribosome-mediated polymerization these four elementary steps correspond to each monomer acting as an A-site or P-site substrate to form a bond with another copy of the same monomer or with a distinct monomer (FIG. 5A). The experimental data presented in the Examples are the first, to the inventors' knowledge, to show that each of these four polymerization steps is possible.

[0449] Thus, in some embodiments the synthesised polymers, polypeptides, or proteins may include at least one non-canonical amino acid directly adjacent to another non-canonical amino acid. This polymer, polypeptide, or protein may include a chain of two, three, four, five, six, seven, eight, nine, ten, 15, 20, or more non-canonical amino acids directly adjacent to each other. The chain may comprise two or three distinct non-canonical amino acids.

[0450] In some embodiments, a polypeptide may be excisable from the synthesised polymer. For instance, the nucleic acid may encode cleavage or cleavable sites either side of the intended product. The excised product may be entirely made of non-canonical amino acids or may comprise one or more canonical amino acid. The excised product may be the chain of non-canonical amino acids described herein.

[0451] The synthesised polymer, including the linear or cyclic polymers, or protein may be purified after the method of synthesis. The purification may take any form known in the art in order to separate the polymer or protein from the cells and culture in which it was made.

[0452] The inventors demonstrate herein the use of prokaryotic cells of the invention for the production of cyclic polymers. The cyclic polymers may be generated via the synthesis of a polymer, as described herein, wherein the polymer is capable of self-cyclisation. The method may comprise the excision of a peptide from the polymer, wherein the peptide is capable of self-cyclisation. Said self-cyclisation may be a part of the excision process, but is not required to be so. The final product may be a macrocycle.

[0453] The macrocycle may include four, five, six, seven, eight, nine, ten, 15, 20, or more monomers. The macrocycle may include at least a first, second, and third non-canonical amino acid.

[0454] The prokaryotic cells of the invention can be used to generate products that are not obtainable by any other methods. As such, in an aspect of the invention, there is provided a polymer obtained from or obtainable by the methods of the invention. In an embodiment, the polymer comprises at least one first non-canonical amino acid, at least one second non-canonical amino acid, and optionally at least one third non-canonical amino acid, wherein the first, second, and third non-canonical amino acids are different from each other. The polymer may comprise least one non-canonical amino acid directly adjacent to another non-canonical amino acid. The polymer may include a chain of two, three, four, five, six, seven, eight, nine, ten, 15, 20, or more non-canonical amino acids directly adjacent to each other. The polymer may be a macrocycle or may be linear. Macrocycles of the present invention may comprise four, five, six, seven, eight, nine, ten or more monomers.

[0455] The prokaryotic cells of the invention may be suitable for the production of a target polymer or protein incorporating at least one non-canonical amino acid, wherein the rate of production is at least 5%, 10%, 15%, 25%, 35%, 50%, 60%, 70%, 80%, 90%, 100%, 110%, or 140% of the rate of production of the wild type control.

[0456] The prokaryotic cells of the invention may be suitable for the production of a target polymer or protein incorporating at least one non-canonical amino acid, wherein yield is at least 0.5, 1, 2, 5, 7.5, 10, 15, 20, or 25 mg/l.

### Methods of Making the Prokaryotic Cells of the Invention

[0457] Methods are provided herein for generating the prokaryotic cells of the invention. Aspects of said methods provide surprisingly effective processes for generating said prokaryotic cells and result in prokaryotic cells with surprisingly beneficial properties.

[0458] Thus, in an aspect of the invention, there is provided a method for producing a prokaryotic cell, wherein the method comprises:
[0459] (i) modifying a prokaryotic cell to express a first orthogonal aminoacyl-tRNA synthetase-tRNA pair suitable for decoding a first type of sense codon, wherein
   [0460] the prokaryotic cell comprises a genome wherein the first type of sense codon has been recoded such that a first endogenous tRNA is dispensable;
[0461] (ii) incubating the prokaryotic cell in the presence of a non-canonical amino acid which is a substrate for the first orthogonal aminoacyl-tRNA synthetase; and
[0462] (iii) modifying the endogenous gene encoding the first endogenous tRNA such that the first endogenous tRNA is not expressed.

[0463] Steps (ii) and (iii) may be performed before step (i).

[0464] In a particular embodiment, steps (i) and (ii) of the above method are performed before step (iii). The inventors have discovered that this particular order is surprisingly effective, and the prokaryotic cells have improved growth during the method. Without being bound to theory, the inventors hypothesise that the beneficial effects arise from a reduction in stalling on unannotated sense codons that may remain in the genome, hence this particular order of steps relieves this stalling and improves growth.

[0465] In a particular embodiment, there is provided a method for producing a prokaryotic cell, wherein the method comprises:
[0466] (i) modifying a prokaryotic cell to express a first orthogonal aminoacyl-tRNA synthetase-tRNA pair suitable for decoding a first type of sense codon, wherein
   [0467] the prokaryotic cell comprises a genome wherein the first type of sense codon has been recoded such that a first endogenous tRNA is dispensable;
[0468] (ii) incubating the prokaryotic cell in the presence of a non-canonical amino acid which is a substrate for the first orthogonal aminoacyl-tRNA synthetase; and
[0469] (iii) modifying the endogenous gene encoding the first endogenous tRNA such that the first endogenous tRNA is not expressed; and
[0470] (a) modifying the prokaryotic cell to express a second orthogonal aminoacyl-tRNA synthetase-tRNA pair suitable for decoding a second type of sense codon, wherein
   [0471] the prokaryotic cell comprises a genome wherein the second type of sense codon has been recoded such that a second endogenous tRNA is dispensable;
[0472] (b) incubating the prokaryotic cell in the presence of a non-canonical amino acid which is a substrate for the second orthogonal aminoacyl-tRNA synthetase; and
[0473] (c) modifying the endogenous gene encoding the second endogenous tRNA such that the second endogenous tRNA is not expressed.

[0474] The modifying of the endogenous gene encoding the first or second endogenous tRNA such that the first or second endogenous tRNA is not expressed, may be according to any technique that would prevent the production of a functional form of the endogenous tRNA within the prokaryotic cell. The functional form of an endogenous tRNA is a form that that would allow the decoding of the tRNAs cognate codon(s). For instance, the endogenous gene may be deleted or a portion of the gene may be deleted to prevent expression. Regulatory sequences may be deleted or altered to prevent expression. Alternatively, nonsense, frameshift, or missense mutations may prevent expression of the tRNA in a functional form.

[0475] Steps (ii) and (iii) may be performed before step (i), and steps (b) and (c) may be performed before step (a).

[0476] In a particular embodiment, steps (i) and (ii) of the above method are performed before step (iii). In addition, or alternatively, steps (a) and (b) may be performed before step (c). The inventors have discovered that this particular order is surprisingly effective, and the prokaryotic cells have improved growth during the method. Without being bound to theory, the inventors hypothesise that the beneficial effects arise from a reduction in stalling on unannotated sense codons that may remain in the genome, hence this particular order of steps relieves this stalling and improves growth.

[0477] The steps to introduce the second orthogonal tRNA synthetase-tRNA pair with the deletion of the dispensable endogenous tRNA (steps (a), (b), and (c)) may be performed before, at the same time, or after the steps to introduce the first orthogonal tRNA synthetase-tRNA pair and deleted the first endogenous tRNA ((steps (i), (ii), and (iii)).

[0478] In an embodiment, the method further comprises modifying the prokaryotic cell to express a third orthogonal aminoacyl-tRNA synthetase-tRNA pair suitable for decoding a first type of stop codon, wherein the first type of stop codon has been recoded within the genome of the prokaryotic cell such that a first endogenous release factor is dispensable.

[0479] This may be applied to any prokaryotic cell comprising a recoded genome with reduced occurrences of a first and second type of sense codon as discussed herein. For instance, the essential genes (as discussed herein) may not contain occurrences of the first or second type of sense codon. Alternatively, or in addition, the genome may comprise 5, 4, 3, 2, 1, or no occurrences of the first or second type of sense codon.

[0480] The method may further comprise modifying the prokaryotic cell to express a third orthogonal aminoacyl-tRNA synthetase-tRNA pair suitable for decoding a first type of stop codon, wherein a first type of stop codon has been recoded within the genome of the prokaryotic cell such that a first endogenous release factor is dispensable. This may be applied to any prokaryotic cell comprising a recoded genome with reduced occurrences of a first type of stop codon as discussed herein. For instance, the essential genes (as discussed herein) may not contain occurrences of the first type of stop codon. Alternatively, or in addition, the genome may comprise 5, 4, 3, 2, 1, or no occurrences of the first type of stop codon.

[0481] The methods for producing a prokaryotic cell may be, for instance, applied to an E. coli cell that does not express tRNA^{Ser}_{UGA}, TRNA^{Ser}_{CGA}, or RF-1, wherein occurrences of the sense codon TCA have been recoded such that tRNA^{Ser}_{UGA} is dispensable (e.g. occurrences of TCA in essential genes of the parent strain have been replaced with AGT), occurrences of the sense codon TCG have been recoded such that tRNA^{Ser}_{CGA} is dispensable (e.g. occurrences of TCG in essential genes of the parent strain have been replaced with AGC), and occurrences of the stop codon TAG have been recoded such that RF-1 is dispensable (e.g. occurrences of TAG in essential genes of the parent strain have been replaced with TAA).

[0482] In particular, the methods may be applied to Syn61, Syn61(ev1), or Syn61(ev2). As such, the methods may be applied to a bacterium that comprises a genome which is at least 80%, 85%, 90%, 95%, 98%, 99%, 99.5%, 99.8%, 99.9%, or 100% identical to any one of: GenBank accession number CP040347.1, SEQ ID NO: 3, or SEQ ID NO: 4.

[0483] The orthogonal tRNA synthetase-tRNA pairs inserted into the cells may be any suitable pairs, including any as described herein.

[0484] In particular embodiments the orthogonal tRNA synthetase-tRNA pairs are: MmPyIRS/MmtRNA^{Pyl}_{YYY}; 1R26PyIRS/AlVERNA^{ΔNPyl(8)}_{YYY}; and AfTyrRS/Af-tRNA^{Tyr(A01)}_{CUA}. The MmtRNA^{Pyl}_{YYY} may be MmtRNA^{Pyl}_{UGA}. The 1R26PyIRS may be 1R26PyIRS(CbzK). The AlvtRNA^{ΔNPyl(8)}_{YYY} may be AlvtRNA^{ΔNPyl(8)}_{CGA}. The AfTyrRS may be AfTyrRS(p-I-Phe).

[0485] In other embodiments the orthogonal tRNA synthetase-tRNA pairs are: MmPyIRS/MmtRNA^{Pyl}_{YYY}; 1R26PyIRS/AlvtRNA^{ΔNPyl(8)}_{YYY}; and MjTyrRS/MjtRNA^{Tyr}_{CUA}. The MmtRNA^{Pyl}_{YYY} may be MmtRNA^{Pyl}_{UGA}. The 1R26PyIRS may be 1R26PyIRS(CbzK). The AlvtRNA^{ΔNPyl(8)}_{YYY} may be AlvtRNA^{ΔNPyl(8)}_{CGA}. The MjTyrRS may be MjTyrRS(3-Nitro-Tyr) or MjTyrRS(p-Az-Phe).

[0486] The inventors have discovered that, unless specific steps are taken, the methods of producing prokaryotic cell may result in growth defects. To overcome these growth defects the inventors make use of methods of mutagenesis and selection. In a particular embodiment, such method steps are performed before the method steps for producing a prokaryotic cell disclosed herein. It is surprising that such methods may be applied in the present context. The inventors initially assumed that the growth defect may be due to a limiting amount of serV, but further experiments revealed this not to be the case (Fredens et al., 2019). As such, it was unclear whether the growth defect was surmountable. In addition, the inventors assumed that random mutagenesis and selection might reverse some of the recoding of the genome and could also potentially have resulted in read-through of the blank codons. However, as demonstrated by the experiments disclosed herein, the inventors were able to reverse the growth defects without a loss of desired functionality.

[0487] Thus, in an embodiment, prior to the steps of the method for producing a prokaryotic cell, the method comprises: inducing mutagenesis in a cell culture comprising any prokaryotic cell that comprises a recoded genome disclosed herein; maintaining the cell culture under exponential growth conditions; selecting a prokaryotic cell from said cell culture with an increased growth rate compared to the initial culture; wherein the steps of the method for producing a prokaryotic cell are applied to the selected prokaryotic cell.

[0488] The mutagenesis, mutation, and selection steps may be part of a parallel mutagenesis and dynamic parallel selection process, as disclosed herein. The parallel mutagenesis and dynamic parallel selection process may be as disclosed in Schmied et al. (W. H. Schmied et al., Controlling orthogonal ribosome subunit interactions enables evolution of new function. Nature 564, 444-448 (2018); herein incorporated by reference).

[0489] In an embodiment, the induction of mutagenesis comprises the use of a mutagenesis plasmid.

[0490] In particular embodiments, the induction of mutagenesis comprises the use of the mutagenesis plasmid “MP6”. MP6 is described in Badran et al. (A. H. Badran, D. R. Liu, Development of potent in vivo mutagenesis plasmids with broad mutational spectra. Nature Communications 6, 8425 (2015); herein incorporated by reference). MP6 may be according to SEQ ID NO: 59.

[0491] In some embodiments, the mutagenesis may be carried out for 5, 10, 15, 17, 20, 30, 45, 60, 70, 80, 100, 150, 200, or more generations. In particular embodiments, the mutagenesis may be carried out for approximately 1-200, 5-100, 10-25, 15-20, or 17 generations.

[0492] In some embodiments, after mutagenesis, the mutator cultures may be maintained at continuous growth. For instance, the mutator cultures may be transferred to multiple vessels (such as the wells of a 96 well plate). The OD₆₀₀ of the culture may be measured after transfer and then periodically again every 2-9 h, depending on the growth rate. When the OD₆₀₀ reaches a threshold of 0.5 for at least 3 mutator cultures, all cultures may be diluted (for instance, 1/400) into fresh vessels. If no cultures reach the threshold, the three highest OD₆₀₀ values may be used to estimate the next OD₆₀₀ measurement time point, i.e. the time required to reach the threshold. If fewer than 3 cultures reach the threshold after three consecutive OD₆₀₀ measurements, the cultures may be incubated for another 12 h before a dilution step regardless of the measured cell density. Overall, this process flexibly adjusts the selective pressure in an effort to keep the fastest growing cultures in exponential growth.

[0493] In some embodiments, the cell culture may be maintained under exponential growth conditions for 5, 10, 15, 20, 30, 40, 50, 52, 60, 70, 80, 100, 200, or more generations. In particular embodiments, the cell culture may be maintained under exponential growth conditions for approximately 20-80, 30-70, 40-60, or 50 generations. In an exemplified embodiment, the number of generations is 52.

[0494] Multiple rounds of mutagenesis, maintenance, and selection may be applied to the cell cultures. For instance, one, two, three, four, five, ten or more rounds may be applied. In particular embodiments, two rounds are applied. In an embodiment, each round includes the induction of mutagenesis for approximately 10-25 (e.g. 17) generations, and maintenance under exponential growth conditions for approximately 20-80 (e.g. 50) generations.

[0495] The mutagenesis, mutation, and selection steps may be applied to Syn61, Syn61(ev1), or Syn61(ev2). As such, the methods may be applied to a cell that comprises a genome which is at least 80%, 85%, 90%, 95%, 98%, 99%, 99.5%, 99.8%, 99.9%, or 100% identical to any one of: the sequence provided in GenBank accession number CP040347.1, SEQ ID NO: 3, or SEQ ID NO: 4.

[0496] The inventors have further discovered that, unless specific steps are taken, the removal of a first endogenous tRNA, a second endogenous tRNA, and/or a first endogenous release factor may result in growth defects. To overcome these growth defects the inventors make use of methods of mutagenesis and selection. In a particular embodiment, such method steps are performed after the method steps for producing a prokaryotic cell disclosed herein. As for the steps prior to the removal of the endogenous genes, it was assumed that random mutagenesis and selection might reverse some of the desired technical features of the prokaryotic cells, for instance leading to read-through of the blank codons. However, again, the inventors surprisingly found that the growth defects could be remedied without a loss of desired functionality.

[0497] Thus, in an embodiment, after the steps of the method for producing a prokaryotic cell, the method further comprises: obtaining a cell culture from the prokaryotic cell; inducing mutagenesis in the cell culture; maintaining the cell culture under exponential growth conditions; and selecting a prokaryotic cell from said cell culture with an increased growth rate compared to the initial culture.

[0498] The mutagenesis, mutation, and selection steps may be part of a parallel mutagenesis and dynamic parallel selection process, as disclosed herein. The parallel mutagenesis and dynamic parallel selection process may be as disclosed in Schmied et al. (W. H. Schmied et al., Controlling orthogonal ribosome subunit interactions enables evolution of new function. Nature 564, 444-448 (2018); herein incorporated by reference).

[0499] The inventors have discovered that the mutagenesis plasmid MP6 is not functional in cells lacking endogenous tRNAs. To circumvent this problem the inventors have designed a new plasmid, referred to as “recoded MP6”. This plasmid may be according to SEQ ID NO: 67.

[0500] In other embodiments, the mutagenesis plasmid may be a known plasmid, wherein the plasmid has been recoded to remove the first type of sense codon, the second type of sense code, and/or the first type of stop codon, and to replace said codons with synonymous codons. For instance, the mutagenesis plasmid might contain only five, four, three, two, one, or no occurrences of the first type of sense codon, second type of sense codon, or first type of stop codon. In a particular embodiment, the mutagenesis plasmid does not contain any occurrences of the first or second type of sense codon nor any occurrences of the first type of stop codon.

[0501] As such, there is provided herein the use of a recoded MP6 or a recoded mutagenesis plasmid for inducing mutagenesis in a recoded prokaryotic cell. Such use may form part of the methods for producing a prokaryotic cell of the invention, as disclosed herein.

[0502] In some embodiments, the mutagenesis may be carried out for 5, 10, 15, 17, 20, 30, 45, 60, 70, 80, 100, 150, 200, or more generations. In particular embodiments, the mutagenesis is carried out for at least 20, 25, 30, 35, or 40 generations. In particular embodiments, the mutagenesis may be carried out for approximately 1-200, 5-100, 10-90, or 25-75 generations. In particular examples, the mutagenesis may be carried out for at least or about 45, 60, 70 generations.

[0503] In some embodiments, after mutagenesis, the mutator cultures may be maintained at continuous growth. This process may be the same as discussed in relation to steps to be performed prior to the removal of the endogenous tRNAs and release factor.

[0504] In some embodiments, the cell culture may be maintained under exponential growth conditions for 5, 10, 15, 20, 30, 40, 50, 52, 60, 70, 80, 100, 200 or more generations. In particular embodiments, the cell culture may be maintained under exponential growth conditions for approximately 20-80, 30-70, 40-60, or 50 generations. In an exemplified embodiment, the number of generations is 52.

[0505] Multiple rounds of mutagenesis, maintenance, and selection may be applied to the cell cultures. For instance, one, two, three, four, five, ten or more rounds may be applied. In particular embodiments, three rounds are applied. In an embodiment, each round includes the induction of mutagenesis for at least 20 generations, and maintenance under exponential growth conditions for approximately 20-80 (e.g. 50) generations. In a particular embodiment, the first round may include approximately 70 generations, the second round may include 45 generations, and the third round may include 60 generations of mutagenesis.

[0506] At any stage during the methods for producing a prokaryotic cell of invention, the method may comprise a phenotyping assay. The phenotyping assay comprises the analysis of whether the first type of sense codon, second type of sense codon, and first type of stop codon remain recoded. The assay may comprise transforming the prokaryotic cell with a reporter plasmid comprising a recoded codon linked to a reporter, such as GFP (suitable reporters are discussed in the Examples). An orthogonal aaRS/tRNA pair, capable of decoding the recoded codon to incorporate a ncAA, is also inserted. The assay may then comprise the incubation of the cells in the presence or absence of the ncAA substrate to determine if there is reporter signal that is dependent on the ncAA. Further details are provided in the Examples.

[0507] As noted above, the inventors have surprisingly discovered that the methods of mutagenesis and selection may be applied to prokaryotic cells with recoded genomes without affecting the recoding.

[0508] Thus, in an aspect of the invention, there is provided a method for improving the growth rate of a prokaryotic cell wherein the genome has been recoded, wherein the method comprises
[0509] inducing mutagenesis in a cell culture comprising the prokaryotic cell that comprises the recoded genome,
[0510] maintaining the cell culture under exponential growth conditions,
[0511] selecting a prokaryotic cell, from said cell culture, with an increased growth rate compared to the initial culture.

[0512] The prokaryotic cell may comprise a genome wherein a first type of sense codon has been recoded. The recoding of a first type of sense codon may be any sense codon, including any recoded type of sense codon as disclosed herein. The prokaryotic cell may comprise a genome wherein a first and a second type of sense codon has been recoded. The recoding of a first and second types of sense codon may be any two sense codons, including any recoded type of sense codon as disclosed herein.

[0513] The methods of inducing mutagenesis, maintaining the cells, and selecting the cell may be any as disclosed herein.

### Methods for Recoding a Genome

[0514] The following methods enable the skilled person to recode genomes to replace sense or stop codons with synonymous codons. Further information is available in: i) K. Wang et al., Defining synonymous codon compression schemes by genome recoding. Nature 539, 59-64 (2016); ii) J. Fredens et al., Total synthesis of Escherichia coli with a recoded genome. Nature 569, 514-518 (2019); iii) WO2018/020248, and iv) WO2020/229592 (each of which is incorporated herein by reference).

[0515] In an example, preferably one or more rounds of recombination-mediated genetic engineering are used to edit 10-1000 kb, 50-1000 kb, 100-1000 kb, or 100-500 kb of a parent genome to provide two or more different partially synthetic genomes. Thus, in preferred examples each round of recombination-mediated genetic engineering inserts or replaces 10 kb or more, 50 kb or more, 100 kb or more, or about 100 kb of DNA in the parent genome.

[0516] As used herein, the term “recombination-mediated genetic engineering” (also known as “recombineering”) is a method for genetic engineering (i.e. editing genomes) based on homologous recombination systems. Typically recombineering is based on homologous recombination in Escherichia coli mediated by bacteriophage proteins, either RecE/RecT from Rac prophage or Redaβδ from bacteriophage lambda. Any suitable method of recombination-mediated genetic engineering may be used. Methods for recombination-mediated genetic engineering will be well known to those of skill in the art.

[0517] In “classical recombination” (exemplified by lambda red mediated recombination in E. coli), short regions of synthetic DNA may be inserted into the genome or used to replace genomic DNA in a two-step process: i) transformation of cells with linear double stranded DNA (dsDNA) carrying a stretch of synthetic DNA, coupled with a positive selection marker, and flanked by a homology region (HR) to the target region of the genome on each end, and ii) recombination mediated by the homologous regions, followed by selection for genomic integration by virtue of the positive selection marker. This approach can be used to insert or replace 2-3 kb of genomic DNA. Thus, if classical recombination is used, many rounds of recombination-mediated genetic engineering would be required to edit 100-500 kb of the parent genome.

[0518] Thus, in preferred examples the one or more rounds of recombination-mediated genetic engineering comprise one or more rounds of replicon excision for enhanced genome engineering through programmed recombination (REXER).

[0519] REXER is described in WO 2018/020248. Each round of REXER may be used to insert or replace about 50 kb to 250 kb, or about 100 kb of DNA in the parent genome.

[0520] Thus, the one or more rounds of recombination-mediated genetic engineering may comprise:
[0521] i) providing a host cell (e.g. E. coli), wherein the host cell comprises an episomal replicon (e.g. a plasmid or a bacterial artificial chromosome) and a target nucleic acid (e.g. the genome), wherein the episomal replicon comprises a donor nucleic acid sequence (i.e. a synthetic region), wherein the donor nucleic acid sequence comprises in order: 5′-homologous recombination sequence 1-sequence of interest-homologous recombination sequence 2-3′, wherein the sequence of interest comprises a positive selectable marker, and wherein the target nucleic acid comprises in order: 5′-homologous recombination sequence 1-negative selectable marker-homologous recombination sequence 2-3 ‘;
[0522] ii) providing helper protein(s) capable of supporting nucleic acid recombination in said host cell (e.g. lambda Red proteins);
[0523] iii) providing helper protein(s) and/or RNAs capable of supporting nucleic acid excision in said host cell (e.g. CRISPR/Cas9 proteins/RNAs);
[0524] iv) inducing excision of said donor nucleic acid sequence;
[0525] v) incubating to allow recombination between the excised donor nucleic acid and said target nucleic acid; and
[0526] vi) selecting for recombinants having incorporated said donor nucleic acid into said target nucleic acid.

[0527] Suitably selecting for recombinants having incorporated said donor nucleic acid into said target nucleic acid comprises selection for gain of the positive selectable marker of the donor nucleic acid and loss of the negative selectable marker of the target nucleic acid. Suitably selection for gain of the positive selectable marker of the donor nucleic acid and loss of the negative selectable marker of the target nucleic acid is carried out simultaneously. Suitably said sequence of interest comprises both a positive selectable marker and a negative selectable marker. Suitably the negative selectable marker is selected from the group consisting of sacB (sucrose sensitivity), rpsL (S12 ribosomal protein-streptomycin sensitivity), or phe^{ST251A_A294G} (4-chlorophenylalanine sensitivity). Suitably the positive selectable marker is selected from the group consisting of Cm^{R} (chloramphenicol resistance), Kan^{R} (kanamycin resistance), Hyg^{R} (hygromycin resistance), Gentamycin^{R} (gentamycin resistance), or tetracycline^{R} (tetracycline resistance). Suitably the step of selecting for recombinants comprises sequential selection for said positive and negative markers, or sequential selection for said negative and positive markers. Suitably the step of selecting for recombinants comprises simultaneous selection for said positive and negative markers.

[0528] Suitably said method as described above further comprises the step of inducing at least one double stranded break in the target nucleic acid sequence, wherein said double stranded break is between said homologous recombination sequence 1 and said homologous recombination sequence 2. Suitably at least two double stranded breaks are induced in the target nucleic acid sequence, wherein each said double stranded break is between said homologous recombination sequence 1 and said homologous recombination sequence 2.

[0529] Suitably said excised donor nucleic acid begins with said homologous recombination sequence 1 and ends with said homologous recombination sequence 2.

[0530] Suitably said episomal replicon comprises a negative selectable marker independent of the donor nucleic acid sequence. Suitably said method comprises the further step of selecting for loss of the episomal replicon by selecting for loss of said negative selectable marker independent of the donor nucleic acid sequence. Suitably said episomal replicon comprises in order: excision cut site 1-donor nucleic acid sequence-excision cut site 2. Suitably said target nucleic acid possesses its own origin of replication capable of functioning within said host cell. Suitably said episomal replicon is a plasmid nucleic acid. Suitably said episomal replicon is a bacterial artificial chromosome (BAC). Suitably said target nucleic acid is the host cell genome.

[0531] The episomal replicon (e.g. BAC) may be assembled by homologous recombination, for example in S. cerevisiae, as described in Kouprina, N., et al., 2004. Methods Mol Biol 255, 69-89. The assembly may combine: 7-14 stretches of synthetic DNA, each 6-13 kb in length; a selection construct (comprising a negative selection marker and/or a positive selection marker); and a BAC shuttle vector backbone. The stretches of synthetic DNA may collectively correspond to the donor nucleic acid sequence (i.e. the synthetic region) in the episomal replicon, wherein each stretch comprises 80-200 bp of overlapping DNA sequence with each other, and wherein the overlap regions are free of any recoding targets. The stretches may be supplied in pSC101 or pST vectors flanked by suitable restriction sites (e.g. Bsal, Avrll, Spel, or Xbal). Thus, during assembly the synthetic DNA stretches may be excised by digestion with the corresponding restriction enzymes. Assembly of the episomal replicon may be verified by sequencing.

[0532] Suitably the two homology regions may be 30-100 bp, or 40-50 bp, or about 50 bp in length.

[0533] CRISPR/Cas9 machinery may be used to for excision. In some examples the CRISPR/Cas9 machinery comprises Cas9, tracrRNA and two spacer RNAs, wherein the spacer RNAs target the two homology regions for excision. In preferred embodiments, the spacer RNAs are linear double stranded spacers. In other embodiments, the CRISPR/Cas9 machinery comprises Cas9 and two sgRNAs, wherein the sgRNAs target the two homology regions for excision.

[0534] Lambda red recombination machinery may be used for recombination. The lambda red recombination machinery may comprise lambda alpha/beta/gamma.

[0535] The method may comprise performing one or more rounds of REXER, i.e. the steps as described above with a first donor nucleic acid sequence, choosing further donor sequence(s) contiguous with said first donor nucleic acid sequence, and repeating said steps with said further donor nucleic acid sequence(s) until the partially synthetic genome has been assembled. This is known as genome stepwise interchange synthesis (GENESIS), described in Wang, K. et al., 2016. Nature 539, 59-64 and is shown schematically in FIG. 4 of WO2020/229592.

[0536] In preferred examples the donor sequence(s) correspond to regions of the synthetic genome.

[0537] Thus, the donor sequence(s) (i.e. synthetic region) may comprise 20 or fewer occurrences of one or more sense codons; and/or the donor sequence(s) may comprise 10 or more, 20 or more, or 100 or more genes with no occurrences of one or more sense codons.

[0538] The donor sequence(s) (i.e. synthetic region) may be identical to sequences (i.e. non-synthetic regions) of the parent genome except that they have 50 or fewer, 20 or fewer, 10 or fewer, 5 or fewer, or 0 occurrences of each of one or more sense codons; and/or comprise less than 10%, 5%, 2%, 1%, 0.5%, 0.1% of the occurrences of each of one or more sense codons, relative to the corresponding region in the parent genome; and/or comprise 10 or more, 20 or more, or 100 or more genes with no occurrences of one or more sense codons.

[0539] The donor sequence(s) (i.e. synthetic region) may also be refactored relative to the sequences (i.e. non-synthetic regions) of the parent genome. For 3′,3′ overlaps (i.e. pairs of genes in opposite orientations) a synthetic insert may be inserted between the genes. For 3′,3′ overlaps the synthetic insert may comprise the overlapping region. For 5′, 3′ overlaps (i.e. pairs of genes in the same orientation) a synthetic insert may be inserted between the genes. For 5′, 3′ overlaps the synthetic insert may comprise: (i) a stop codon; (ii) about 20-200 bp, or 20-100 bp, or 20-50 bp, from upstream of the overlapping region; and (iii) the overlapping region. Preferably, the synthetic insert comprises: (i) a stop codon; (ii) about 20 bp from upstream of the overlapping region; and (iii) the overlapping region. In preferred embodiments the stop codon is in frame with the original start site for the downstream gene. Preferably the stop codon is TAA.

[0540] Preferably the donor sequence(s) (i.e. synthetic region) are collectively 50-10000 kb, 100-5000 kb, 100-2000 kb, 100-1000 kb, or 100-500 kb in size. Preferably each donor sequence is 50-300 kb, 100-200 kb, or about 100 kb in size.

[0541] Accordingly, the donor sequences may each be about 100 kb in size and identical to corresponding sequences of the parent genome, except they comprise no occurrences of one or more sense codons and all pairs of genes which share an overlapping region comprising the one or more sense codons in the parent genome are refactored, wherein the pairs of genes are those in which sense codon replacements would change the encoded protein sequence of both or either of the pair of genes.

[0542] In preferred examples the viability of the genome is tested after each round of recombination-mediated genetic engineering. In some examples the sequence of the genome is verified after each round of recombination-mediated genetic engineering.

[0543] In some embodiments the genome is a reduced synthetic genome or a minimal synthetic genome. A “reduced genome” is one in which the size of the parent genome has been reduced by removing non-essential genes and/or non-coding regions. A “minimal genome” is a genome which has been reduced to its minimal size whilst remaining viable e.g. by deletion of all non-essential regions of the genome.

### Refactoring

[0544] Genomes contain numerous overlapping open reading frames (ORFs), which can be classified as 3′, 3′ (between ORFs in opposite orientations) or 5′, 3′ (between ORFs in the same orientation). The sense codons to be replaced may be found within both classes of overlap in the parent genome.

[0545] If the replacement of the sense codons of each ORF within an overlap can be achieved without changing the encoded protein sequence of either ORF (i.e. by introducing synonymous codon(s)) then it may not be necessary to edit (e.g. refactor) the parent genome. However, when the encoded protein sequence is changed by the replacement of the sense codons, (i.e. one or more synonymous sense codons are not introduced into one or both of the ORFs), then it may be necessary to edit (e.g. refactor) the parent genome.

[0546] Thus, in some examples one or more pairs of genes which share an overlapping region comprising the sense codons in the parent genome are refactored. “Refactored” means that the genes are reorganised to prevent changes to the encoded protein sequences. Preferably, the pairs of genes are those in which sense codon replacements (e.g. defined synonymous codon replacements) would change the encoded protein sequence of both or either of the pair of genes. Most preferably, all pairs of genes which share an overlapping region comprising the sense codons in the parent genome are refactored, wherein the pairs of genes are those in which sense codon replacements (e.g. defined synonymous codon replacements) would change the encoded protein sequence of both or either of the pair of genes.

[0547] For 3′,3′ overlaps (i.e. pairs of genes in opposite orientations) a synthetic insert may be inserted between the genes. For 3′,3′ overlaps the synthetic insert may comprise the overlapping region.

[0548] For 5′, 3′ overlaps (i.e. pairs of genes in the same orientation, comprising an upstream gene and a downstream gene) a synthetic insert may be inserted between the genes. For 5′,3′ overlaps the synthetic insert may comprise: (i) a stop codon; (ii) about 20-200 bp, or 20-100 bp, or 20-50 bp, from upstream of the overlapping region; and (iii) the overlapping region. Preferably, the synthetic insert comprises: (i) a stop codon; (ii) about 20 bp from upstream of the overlapping region; and (iii) the overlapping region. This preserves the sequence of the RBS for the downstream ORF and the distance between this RBS and its start codon.

[0549] In preferred embodiments the stop codon is in frame with the original start site for the downstream gene. Preferably the stop codon is TAA.

### General

[0550] In all instances, where a “prokaryotic cell” described, the invention also extends to a cell culture containing a plurality of the prokaryotic cells. Similarly, where a “bacterium” is described, the invention also extends to a bacterial culture containing a plurality of the bacteria.

[0551] Sequence comparisons can be conducted with the aid of readily available sequence comparison programs. These publicly and commercially available computer programs can calculate sequence identity between two or more sequences.

[0552] The skilled technician will appreciate how to calculate the percentage identity between two nucleic sequences. In order to calculate the percentage identity between two nucleic sequences, an alignment of the two sequences must first be prepared, followed by calculation of the sequence identity value. The percentage identity for two sequences may take different values depending on: (i) the method used to align the sequences, for example, the Needleman-Wunsch algorithm (e.g. as applied by Needle (EMBOSS) or Stretcher (EMBOSS), the Smith-Waterman algorithm (e.g. as applied by Water (EMBOSS)), or the LALIGN application (e.g. as applied by Matcher (EMBOSS); and (ii) the parameters used by the alignment method, for example, local versus global alignment, the matrix used, and the parameters applied to gaps.

[0553] Having made the alignment, there are many different ways of calculating percentage identity between the two sequences. For example, one may divide the number of identities by: (i) the length of shortest sequence; (ii) the length of alignment; (iii) the mean length of sequence; (iv) the number of non-gap positions; or (iv) the number of equivalenced positions excluding overhangs. Furthermore, it will be appreciated that percentage identity is also strongly length-dependent. Therefore, the shorter a pair of sequences is, the higher the sequence identity one may expect to occur by chance.

[0554] A calculation of percentage identities between two nucleic acid sequences may then be calculated from such an alignment as (N/T)*100, where N is the number of positions at which the sequences share an identical residue, and T is the total number of positions compared including gaps but excluding overhangs.

[0555] The sequence alignment may be a pairwise sequence alignment. Suitable services include Needle (EMBOSS), Stretcher (EMBOSS), Water (EMBOSS), Matcher (EMBOSS), LALIGN, or GeneWise. In an example, the identity between two nucleic sequences may be calculated using the service Needle (EMBOSS) set to the default parameters, e.g. matrix (BLOSUM62), gap open (10), gap extend (0.5), end gap penalty (false), end gap open (10), and end gap extend (0.5). In another example, the identity between two nucleic acid sequences may be calculated using the service Matcher (EMBOSS) set to the default parameters, e.g. matrix (BLOSUM62), gap open (1), gap extend (1).

[0556] All of the features described herein (including any accompanying claims, abstract and drawings), and/or all of the steps of any method or process so disclosed, may be combined with any of the above aspects in any combination, except combinations where at least some of such features and/or steps are mutually exclusive.

[0557] For a better understanding of the invention, and to show how embodiments of the same may be carried into effect, reference will now be made to the Examples, which are not intended to limit the invention in any way.

### EXAMPLES

[0558] It is widely hypothesised that removing cellular tRNAs-making their cognate codons unreadable—might create a genetic firewall to viral infection and enable sense codon reassignment. However, it has been impossible to test these hypotheses because no such bacteria have been created. Here—following synonymous codon compression and laboratory evolution in Escherichia coli—the inventors delete the tRNAs and release factor-1, which normally decode two sense codons and a stop codon; the resulting cells cannot read the canonical genetic code and are completely resistant to a cocktail of viruses. The inventors reassign these codons to enable the efficient synthesis of proteins containing three distinct non-canonical amino acids. Importantly, the inventors demonstrate the facile reprogramming of the cells for the encoded translation of diverse non-canonical heteropolymers and macrocycles.

### Example 1—Creating Syn61Δ3

[0559] The inventors predicted that replacing the annotated TCA, TCG and TAG codons in the genome of a bacteria cell would enable deletion of serT and serU (encoding tRNA^{Ser}_{UGA} and tRNA^{Ser}_{CGA}) and prfA (encoding RF-1), which decode these codons, in a single strain (FIG. 1A). The inventors have previously showed that serT, serU and prfA could be deleted in separate strains derived from Syn61 (18); however, this does not capture the potential epistasis between these genes. As such, the experiments disclosed herein asked whether serT, serU and prfA could be deleted in a single strain derived from Syn61.

[0560] Syn61 grows 1.6-fold slower than the strain from which it was derived (18). To increase the growth rate of the strain prior to serT, serU and prfA deletion, a previously described random parallel mutagenesis and automated dynamic parallel selection strategy was applied (19); this approach uses feedback control to dynamically dilute mutated cultures on the basis of growth rate, and thereby selects fast growing strains from within mutated populations (FIG. 6A). Through two consecutive rounds of mutagenesis and selection a strain was created, Syn61(ev2), which grew 1.3-fold faster (FIG. 1B, FIGS. 6B-6E, and Data files S1 and S2).

[0561] Next, serU, serT and prfA were removed from Syn61(ev2) to create Syn61Δ3 (FIG. 1A, FIG. 6C, and Data files S1 and S2). This demonstrated that removing the target codons in Syn61 was sufficient to enable the deletion of all decoders of the target codons in the same strain. However, Syn61Δ3 grew 1.7-fold slower than Syn61(ev2) (FIG. 1B). This growth decrease may result from the presence of target codons in the genome of Syn61 that were not annotated and targeted (20, 21), and may also result from the other non-canonical roles that tRNAs may play (22, 23).

[0562] Three sequential rounds of random parallel mutagenesis and automated dynamic parallel selection were performed in order to evolve Syn61Δ3 to Syn61Δ3(ev5), which grew 1.6-fold faster than Syn61Δ3 (FIGS. 1A and 1B, FIGS. 6B, 6C, and 6F-6H, and Data file S1). When grown in LB media in shake flasks the doubling time of Syn61Δ3(ev5) was 38.72+/−1.02 min (FIG. 6I). Syn61Δ3(ev5) contains 482 additional mutations—420 substitutions and 62 indels—of which 72 are in intergenic regions, with respect to Syn61 (Data files S1 and S3, FIGS. 7A-7E). No target codons were reverted, further demonstrating the stability of our recoding scheme. 16 sense codons in non-essential genes were converted to target codons (5xTCG, 3xTCA, 8xTAG); these frequencies are comparable to those observed for other codons (Data file S1). Subsequent experiments used Syn61Δ3 or (once available) its evolved derivatives to investigate the new properties of these strains.

### Materials and Methods—for Example 1

### Gene Recoding

[0563] For genes and plasmids used in this work it was necessary to compress the genetic code. The genetic code of protein CDSs was compressed using the recoding rules implemented in the design of Syn61 (TCG to AGC, TCA to AGT, TAG to TAA) using a custom Python script (18)—see Data file S2 for sequence details.

### Construction of Recoded Helper and MP6 Plasmid

[0564] All cloning procedures from this section were performed in E. coli DH10b or MDS42, both strains containing an rpsLK43R mutation for resistance to streptomycin. The helper plasmid used throughout this study for all lambda-red-mediated recombination experiments is a recoded version of the ‘helper’ plasmid pKW20_CDFtet_pAraRedCas9_tracrRNA described in ref (18), which is referred to herein as ‘recoded helper’; see Data file S2 for sequence details.

[0565] To construct the recoded helper plasmid the sequence was first divided into five sections with 20-25 bp overlaps: i) section 1 encoding araC, pBAD promoter and lambda-red gamma, ii) section 2 encoding lambda-red beta and alpha followed by a unique Bsal site, iii) section 3 encoding Cas9 flanked by Bsal sites, iv) section 4 encoding an apraR selection marker, and v) section 5 encoding the pCDF origin, a tracrRNA cassette and an ampicillin promoter.

[0566] Sections 1-3 were synthesized by Genewiz, section 4 was synthesized as a gBlock (IDT) and section 5 was amplified by PCR from the original helper plasmid (18).

[0567] To assemble the recoded helper plasmid, firstly sections 4 and 5 were combined by overlap-extension PCR. The product was then assembled together with sections 1 and 2 into an intermediate plasmid by HiFi Assembly (NEB). The intermediate plasmid was transformed into E. coli MDS42 and its sequence verified by next generation sequencing (NGS). Finally, the intermediate plasmid was digested with Bsal, and assembled together with section 3 by HiFi Assembly to generate the recoded helper plasmid. The plasmid sequence was verified by NGS. The inventors designed a recoded version of MP6 mutagenesis plasmid (31) for Syn61 strain evolution. The recoded sequence was divided into four overlapping sections, so as to minimise expression of the mutagenic components during cloning: i) section 1 encoding araC and the pBAD promoter, ii) section 2 encoding most of dnaQ926 followed by an Avrll site, PmCDA1, and cat for chloramphenicol resistance, iii) section 3 encoding the N-terminus of dnaQ926 followed by dam, seqA, emrR, and ugi and iv) section 4 containing the pCDF origin. Sections 1-3 were synthesised by Genewiz and Twist Bioscience, while section 4 was amplified by PCR from the original MP6 plasmid (31). Section 4 was combined with sections 1 and 2 by HiFi Assembly (NEB), generating an intermediate plasmid, and the overlaps between sections were verified by Sanger sequencing. Finally, the intermediate plasmid was digested with Avrll and assembled together with section 3 by HiFi Assembly to generate recoded MP6. The plasmid sequence was verified by NGS (see Data file S2 for sequence details).

### Automated Parallel Evolution and Strain Isolation

[0568] Two rounds of parallel mutagenesis and automated dynamic parallel selection were applied to Syn61 and later three rounds to Syn61Δ3. For mutagenesis, Syn61 was transformed with the mutagenesis plasmid MP6 (31) (or recoded MP6 for Syn61Δ3 and derivative evolutions) and the cells grown on LB agar containing 2% glucose and 20 μg/mL chloramphenicol. 96 individual colonies were picked into wells containing 200 μL of LB medium supplemented with 2% glucose and 20 μg/mL chloramphenicol and the colonies were grown overnight at 37° C., 220 rpm. The dense overnight cultures were diluted 1/400 into fresh LB medium supplemented with 20 μg/mL chloramphenicol and grown to OD₆₀₀˜0.1. Mutagenesis was induced by addition of L-arabinose to a final concentration of 0.5%, creating independent mutator cultures in each well. The mutator cultures were grown for 24 h at 37° C., 220 rpm. Following a 1/400 dilution step into fresh induction medium (LB with 20 μg/ml chloramphenicol and 0.5% L-arabinose), the cultures were grown for another 24 h at 37° C., 220 rpm. This equates to a growth phase of approximately 17 generations with induced mutagenesis (2×log₂(400)). In later rounds of evolution, the induction of mutagenesis was extended to up to 70 generations. Mutagenesis was induced for ˜17 generations in round 1 and 2 of Syn61 evolution. During Syn61Δ3 evolution mutagenesis was induced for ˜70 generations in round 1, ˜45 generations in round 2 and ˜60 generations in round 3.

[0569] Following mutagenesis, the mutator cultures were diluted 1/2 into a fresh 96-well plate with 200 μl LB medium supplemented with2% glucose to suppress mutagenesis. The plate was transferred onto a robotics platform (Beckman Coulter Biomek FXp accessing Thermofisher Cytomat 2C incubator shaker and Molecular Devices SpectraMax 13 plate reader) for continuous growth (37° C., 400 rpm) and automated dynamic parallel selection for the fastest growing clones. The OD600 was measured in each well at the start and then periodically again every 2-9 h, depending on the growth rate. When the OD₆₀₀ reached a threshold of 0.5 for at least 3 mutator wells, all cultures were diluted 1/400 into a fresh plate with 200 μl LB supplemented with 2% glucose. If no wells had reached the threshold, the three highest OD₆₀₀ values across the plate were used to estimate the next OD₆₀₀ measurement time point, i.e. the time required to reach the threshold. If fewer than 3 wells reached the threshold after three consecutive OD₆₀₀ measurements, the plate was incubated for another 12 h before a dilution step was implemented regardless of the measured cell density. Overall, this process flexibly adjusts the selective pressure in an effort to keep the fastest growing wells in exponential growth. After 6 dilution steps (equivalent to an estimated growth for 52 generations) the workflow was terminated and the growth rate was determined for all evolved mutator wells in the final plate as described below. The wells of evolved populations with the lowest doubling times were streaked out on LB agar plates with 2% glucose and 200 μg/ml streptomycin and incubated overnight at 37° C. to obtain single colonies. 4-12 individual evolved colonies were picked from each streaked population and growth rates measured for individual clones in direct comparison with the progenitor strain before evolution. The fastest growing clones were prepared for next-generation sequencing and further analysis as described below.

[0570] After one round of Syn61 evolution, cells from ten independent wells of the 96 well plate were streaked to obtain single colonies. 80 clones were picked from these streaks and their doubling time screened. 20 out of 80 screened clones isolated initially emerged with a reduced doubling time in single replicate experiments. However, only 4 of these clones showed improved growth in subsequent measurements that were performed in replicate. Two of these four clones (C02.5 and C02.6) are derived from a single well and the other two clones are both derived from a distinct single well (C04.4 and C04.7). All four clones were sequenced (see Data file S1 for a complete list of all accumulated mutations). One of these clones (C04.4) was carried forward and re-named Syn61(ev1).

[0571] After evolution of Syn61(ev1), cells from twelve independent wells of the 96 well plate were streaked to obtain single colonies. 88 clones were picked from these streaks and their doubling time screened. 18 out of 88 screened clones isolated initially emerged with a reduced doubling time in single replicate experiments. However, only 3 of these clones showed improved growth in subsequent measurements that were performed in replicate. Two of these clones (A11.2 and A11.3) are derived from a single well, and the third clone (E10.4) was from a distinct well. All three clones were sequenced (see Data file S1 for a complete list of all accumulated mutations). One of these clones (A11.2) was carried forward and re-named Syn61(ev2). Syn61(ev2) was used to generate Syn61Δ3.

[0572] Syn61Δ3 was evolved in two 96 well plates. Cells from 42 independent wells were steaked and a total of 184 clones were picked from these streaked cells and their doubling time screening (88 of the clones were from 22 wells in plate 1 and 96 clones were from 20 wells from plate 2). 130 out of the 184 clones stood out initially with reduced doubling time compared to Syn61Δ3. 22 of the fastest growing clones were characterised in (mostly) replicate growth experiments. These clones were derived from 11 independent wells (Plate 2: F11.2, F11.3, F11.5, F11.6, F11.7, F11.8, F11.9, F11.10 (all from well F11), E10.1, E5.1, F5.2, F8.1, F8.2, G5.2, A11.1; Plate 1: A7.4, D8.2, D8.4, A9.1, G8.1, D1.2, D11.1). The following clones were sequenced and selected for further sequencing analysis (see Data file S1 for a complete list of all accumulated mutations): A7.4, F11.9, E5.1, D8.2. One of these clones (F11.9) was carried forward and renamed Syn61Δ3(ev3).

[0573] 96 independent wells of Syn61Δ3(ev3) were evolved. 19 wells with the lowest overall doubling time were streaked and 90 clones were isolated from 18 wells since one well did not survive the streak. 37 clones emerged with a reduced doubling time in single replicate measurements. 22 clones with the fastest growth were selected for replicate measurements and 8 clones from 5 distinct wells were identified to have improved growth compared to the progenitor: E7.4, E7.2 (from well E7); E10.3, E10.4 (from well E10); D5.3, D5.1 (from well D5); D8.1, B9.1. Four clones were sequenced and selected for further sequencing analysis: E7.4, E7.2, E10.4, D5.3 and D8.1 (Data file S1). One clone with the most improved growth (E7.4) was selected for the next round of evolution and renamed it Syn61Δ3(ev4).

[0574] Syn61Δ3(ev4) was evolved in one 96-well plate (plate 1), with an adapted selection programme (with the maximum time for growth before the next dilution set to 6.5 h instead of 12 h) after the experiment did not yield any well with improved doubling time with the initial programme (12 h maximum time for growth before the next dilution). Also performed was a consecutive round of selection without intermediate mutagenesis on plate 1 and the resulting set of evolved pools are referred to as plate 2. Overall, fewer wells survived the adapted dynamic selection. 13 wells were streaked from plate 1 and 7 wells were streaked from plate 2 and a total of 152 clones were screened in single replicate measurements (96 from plate 1 and 56 from plate 2). 43 clones showed initial improved growth but only 5 clones remained with reproducibly faster growth in replicate measurements compared to the non-evolved progenitor, all from distinct wells: Plate 1: B12.3, D5.3, G12.6, E7.3; Plate 2: E8.4. One clone was selected as the most evolved Syn61 derivative used in this study (B12.3) and it was renamed Syn61Δ3(ev5).

Deletion of prfA, serU and serT by lambda-red recombination to generate Syn61Δ3

[0575] A scarless deletion of serU, serT and prfA in Syn61(ev2) was performed, with each deletion proceeding through two sequential lambda-red mediated recombinations. In the first recombination a double selection marker cassette was provided to the recipient cell to replace the target gene. A repair template was provided in a second recombination to remove the double-selection marker and replace it with the native environment of the targeted locus, where only the sequence corresponding to the target gene was missing.

[0576] A recoded version of the rpsL-kan^{R} selection marker cassette (18) was used for all deletions. The recoded rpsL-kan^{R} was amplified with oligos containing ˜50 bp homology to the flanking genomic sequences of serU, serT and prfA. The repair templates for serU, serT and prfA were constructed through overlap extension PCR; the 500-600 bp regions directly upstream and downstream of the target gene were amplified from a Syn61 genomic DNA template with oligos designed to overlap by ˜40 bp. These two fragments were then combined into one PCR product by overlap extension PCR, and used it as a repair template. All oligonucleotide sequences are provided in Data file S2.

[0577] For the first recombination, Syn61(ev2) cells were transformed with the recoded helper plasmid. Single colonies were inoculated into 2xYT medium with 50 μg/ml apramycin and grown overnight at 37° C., shaking at 220 rpm. The overnight culture was diluted in 500 mL of 2xYT medium with 50 μg/ml apramycin to OD₆₀₀=0.05 and the cells grown at 37° C. with shaking until OD₆₀₀=0.2. To induce lambda-red expression, L-arabinose powder was added to the culture to a final concentration of 0.5% w/v and incubated the culture for one additional hour at 37° C. with shaking. The cells were harvested at OD₆₀₀=0.6, and the cells were made electrocompetent as described previously (32). 100 μL of electrocompetent cells were electroporated with ˜4 μg of rpsL-kan^{R} PCR product with homology to the serU locus, recovered for 1 hour in 4 mL SOB and then transferred to 100 ml 2xYT supplemented with 50 μg/ml apramycin. After 4 hours the cells were spun down and resuspended in 500 μL H₂O and plated in serial dilutions on 2xYT agar plates supplemented with 2% glucose, 50 μg/ml apramycin and 50 μg/ml kanamycin. The plates were incubated overnight at 37° C., and subsequently individual colonies were picked. These colonies were restreaked onto 2xYT agar plates supplemented with 2% glucose, 50 μg/ml apramycin and 50 μg/ml kanamycin. After overnight incubation at 37° C., the intended deletions were verified by colony PCR with primers flanking the locus of interest. This process was then repeated in the resulting strain, Syn61(ev2)ΔserU∴rpsL-kan^{R}, providing the serU repair template and counter-selecting on 2xYT agar plates supplemented with 2% glucose, 50 μg/ml apramycin and 200 μg/ml streptomycin. Removal of the rpsL-kan^{R} cassette was verified by colony PCR and Sanger sequencing. Sequential deletion of serT and prfA through an analogous 2-step process resulted in the creation of Syn61Δ3.

### Growth Rate Measurement and Analysis

[0578] Bacterial clones were grown overnight at 37° C. in LB supplemented with 200 μg/mL streptomycin. Overnight cultures were diluted 1:200 into 200 μL fresh medium in a 96-well plate. Growth was monitored on an Infinite 200 Pro plate reader (Tecan AG, Switzerland) at 37° C. with high speed linear shaking. Measurements of OD₆₀₀ were taken every 5 min for 18 h. To determine doubling times, the growth curves were log₂-transformed and the first derivative was determined (d(log₂(x))/dt) for all consecutive time-points. The inventors used the mean over ten consecutive time-points with the maximal log₂-derivative to calculate the doubling time (1/mean (max log₂-derivative)). Growth rates were calculated as the slope of a linear fit to the ten consecutive time-points with the maximal log₂-derivatives (as determined above). Curve fitting (linear regression) was performed on replicates simultaneously using Prism7 (Graphpad). Error bars show±standard error of the fit.

[0579] To determine growth under standard laboratory conditions overnight cultures of Syn61Δ3(ev5) were diluted 1:100 into 80 ml fresh medium in a 250 ml conical flask. Three replicate cultures were incubated at 37° C. with shaking (220 rpm) and OD₆₀₀ measurements were taken every 10-30 min, every 10 min during exponential phase. For each independent culture the inventors log₂-transformed the growth curves and selected a 60 min window with the fastest growth during exponential phase. The growth rate (slope) and doubling time (1/slope) were calculated from a linear fit to log₂-derivatives of six consecutive time-points within the window. Curve fitting (linear regression) was performed for each replicate with Prism7 (Graphpad) and the average doubling time and growth rate was calculated. Error bars show±standard error of the mean.

### Preparation of Whole-Genome Libraries for Next-Generation Sequencing

[0580] Colonies were picked from the clones of interest and used to inoculate 5 mL of LB supplemented with 200 μg/mL streptomycin, and incubated at 37° C. overnight with shaking at 220 rpm. Genomic DNA was extracted from these cultures with the DNEasy Blood and Tissue Kit (QIAgen), as per manufacturer's instructions. From purified genomic DNA, paired-end sequencing libraries were prepared with the Nextera XT DNA Library Preparation Kit (Illumina) by hand or with a Biomek FXp (Beckman Coulter), following the manufacturer's protocol but with reduced volumes: input gDNA (0.2 ng/μL, 1 μL), TD Buffer (2 μL), ATM (1 μL), NT Buffer (1 μL), indeces (1 μL), NPM (3 μL). Index sequences were generated from the ‘Illumina Adapter Sequences’ support document (Nextera DNA indexes, pg 16, dated June 2020), purchased from Biomers and used at 10 μM. Libraries were then purified with AMPure XP magnetic beads (Beckman Coulter) as per manufacturer's instructions (6:10 bead: reaction vol. ratio). Libraries were quantified by Qubit (Thermofisher) and subsequently pooled, denatured and paired-end sequenced on a MiSeq (Illumina) according to manufacturer's instructions using v3 MiSeq reagent kits of either 600 cycles (2×300 cycles) or 150 cycles (2×75 cycles).

### Analysis of Syn61 Knockout and Evolved Strains

[0581] To analyse the genome sequences of the Syn61 derivatives generated in this work the inventors used breseq, a software package that aligns next generation sequencing reads (generated as above) to a reference genome and identifies mutations, deletions and insertions (33). The program was used to analyse isolated clones after each round of evolution or targeted gene knockout (serT, serU, prfA), to identify the mutations that arose during the generation of these strains (Data file S1 contains a list of all intermediate strains and mutations). Additionally, a previously described workflow (32) was used to align reads to a reference Syn61 genome sequence and visualised read alignments in the Integrative Genomics Viewer (34). Further, the inventors identified ORFs with more than one mutation (FIGS. 7A-7E). Since clones derived from the same evolved pool were found to be nearly identical in their sequence the inventors selected only one clone per pool for the analysis, one with the most overall mutations. The inventors compared all mutations in ORFs accumulated during evolution before the deletion of serT, serU and prfA separately from mutations gained in the evolution of Syn61Δ3 due to alteration of the genetic background upon removal of the decoding elements. Under the assumption that mutations are independent events the inventors calculated the probability for at least two mutations arising by chance in one ORF by

$$p = 1 - \frac{a !}{{a}^{b} ( a - b ) !} ,$$

where a is the total number of ORFs (a=3556 in Syn61) and b is the average number of mutations accumulated in ORFs after one round of evolution.

### Example 2—tRNA Deletion Ablates Virus Production in Syn61Δ3

[0582] The inventors investigated the effects of deleting the genes encoding tRNA^{Ser}_{CGA} and tRNA^{Ser}_{UGA} and RF-1 on phage propagation by Syn61Δ3 (FIG. 2A), in a modified one-step growth experiment (24).

[0583] For Syn61(ev2) the total titer of phage T6 (a representative of the lytic, T-even family (FIG. 2B)) briefly dropped (as phage infect cells) before rising to 2-logs₁₀ above the input titer, as infected cells produced new phage particles (FIG. 2C, FIG. 8A). As expected, the OD₆₀₀ of Syn61(ev2) was decreased by infection with T6 phage, which is lytic (FIG. 2D). Syn61ΔRF-1 (Data file S1) and Syn61(ev2) produced a comparable level of phage on a comparable timescale, and showed similar changes in OD₆₀₀ upon infection. The inventors conclude that deletion of RF-1 alone has little, if any, effect on T6 phage production or cell lysis.

[0584] Infection of Syn61Δ3 with T6 phage led to a steady decrease in total phage titer. Importantly, this decrease was comparable to that observed when protein synthesis—and therefore phage production in cells—was completely inhibited by addition of gentamicin (FIG. 2C, FIG. 8B). Moreover, T6 infection had a minimal effect on the growth of Syn61Δ3 (FIG. 2D). The inventors conclude that Syn61Δ3 does not produce new phage particles upon infection with T6 phage and that T6 phage does not lyse these cells. Similar results were obtained with T7 phage, which has 57 TCG codons, 114 TCA codons and 6 TAG codons in its 40 kb genome (FIGS. 8A, 8C, and 8D). The inventors treated cells with a cocktail of phage containing lambda, P1vir, T4, T6 and T7, which have TCA or TCG sense codons 10- to 58-times more abundant than the amber stop codon in their genomes (FIG. 2E, FIG. 8E), and found that the treatment with this phage cocktail led to lysis of Syn61(ev2) and Syn61ΔRF-1, but had little effect on the growth of Syn61Δ3 (FIGS. 2F and 2G), suggesting that the deletion of tRNAs in Syn61Δ3 provides resistance to a broad range of phage.

### Materials and Methods—for Example 2

### General Phage Methods

[0585] Phage λ, P1vir, T4, and T6 were provided by George Salmond (University of Cambridge, Department of Biochemistry). Phage T7 was obtained from ATCC (BAA-1025-B2). The titer of each phage stock was estimated by serially diluting stocks in phage buffer (1 mM MgSO4, 1 mM Tris-HCl, 0.1% gelatine), then infecting E. coli MG1655 in top agar (LB agar with 0.35% agar), and allowing plaques to mature at 37° C. overnight. The plaques were counted and the PFU/mL was calculated for each stock.

### Total Titer of Infecting Phage

[0586] Overnight cultures of E. coli Syn61 variants were diluted to OD₆₀₀=0.5 in 2xYT, and then transferred 3 mL to 50 mL Falcon tubes and infected them with phage T6 or T7 (MOI=5·10⁻² and 5·10⁻⁵, respectively). For each phage a cell-free control was included, where phage was added to 3 mL 2xYT. The infected cultures were incubated at 37° C. for 4 hours, shaking at 220 rpm. At relevant timepoints 100 μL of sample was transferred from each culture to a microcentrifuge tube on ice, containing 400 μL phage buffer and 50 μL chloroform. Samples were immediately vortexed thoroughly, centrifuged at 13000×g for 4 min, transferred to a LoBind microcentrifuge tube (Eppendorf) and stored at 4° C. To quantify phage titer, each sample was serially diluted in phage buffer. 10 μL of the relevant dilution was used to infect a 200 μL overnight culture of E. coli MG1655 grown in 2xYT. Infected cells were mixed with 4 mL molten top-agar and poured onto a TYE agar plate. After drying, plates were incubated at 37° C. overnight for bacterial lawns to grow and phage plaques to develop. The number of plaques were counted and multiplied by the dilution in order to calculate the phage titer of the original sample.

[0587] As a background control, E. coli Syn61 was rendered metabolically inactive: the inventors diluted an overnight culture to OD₆₀₀=1 in 10 mL 2xYT, added gentamycin to a final concentration of 1000 μg/mL, and incubated the cells at 37° C. for 6 hours, shaking at 220 rpm. The cells were centrifuged at 4000×g for 10 mins and then the supernatant, which contained the antibiotic, was aspirated. The inactive cells were resuspended in 2xYT to OD₆₀₀=0.5 and infected them with phage as above. The inventors assessed the metabolic activity of the gentamycin-treated cells by 35S incorporation into newly synthesized proteins. 1 mL of gentamycin-treated E. coli Syn61 culture (OD₆₀₀=0.5) was incubated for 1 hour at 37° C. in the presence of 1.5 μL 35S labelled mixture of methionine and cysteine (11 mCi/mL, 1175 Ci/mmol, Perkin Elmer NEG072).

[0588] The inventors measured the OD₆₀₀ at the end of the incubation, spun down the cells at 4000×g for 10 min washed the cells with cold PBS. Based on the OD₆₀₀ measurement above, the cells were resuspended in 1× BugBuster Protein Extraction Reagent (Merck) to a density of 1.4×10⁹ cells/mL (assuming that OD₆₀₀ of 1.0=1×10⁹ cells/mL with 1 cm pathlength). Cells were lysed for 1 hour and the equivalent of 2.8×10⁷ cells were loaded on each lane of a 4-12% Bis-tris polyacrylamide gel. The inventors then analysed the lysates by SDS-PAGE, following by staining with Quick Coomassie Stain (Neo Biotech) as per manufacturer's instructions. The resulting gels were dried and exposed to a storage phosphor screen (GE Healthcare Life Sciences) for 2 weeks, followed by imaging on an Amersham Typhoon (GE Healthcare Life Sciences).

### Phage Infection Assays

[0589] For simultaneous infection by multiple phage, the inventors prepared cultures of Syn61 variants as above and added a cocktail of all five phage (λ, P1vir, T4, T6, and T7, MOI=1·10⁻² for each phage). Cell growth and lysis was monitored by measuring OD₆₀₀ after 4 hours and comparing to uninfected cultures.

### Phage Genome TCG, TCA, TAG Codon Counting

[0590] The inventors identified the number and location of the TCG, TCA and TAG codons in the genome of different phage using a custom Python 3.7 script. Briefly, the script opens a GenBank file containing the annotated genome of the phage of interest using Biopython (35), then scans coding sequences to identify target codons and their location, and stores them in memory. The Python library matplotlib (36) is then used to generate a plot of the genome where the location of each target codon is represented with a vertical line.

### Example 3—ncAA Incorporation

Reassigning Target Codons for ncAA Incorporation

[0591] The inventors expressed Ub₁₁ₓₓₓ genes (ubiquitin-His₆ bearing TCG, TCA or TAG at position 11), and genes encoding the cognate orthogonal MmPyIRS/MmtRNA^{Pyl}_{YYY} pair (25) (in which the anticodon is complementary to the codon at position 11 in the Ub gene) in Syn61Δ3(ev5) (FIG. 3A, Data file S2).

[0592] In the absence of added ncAA, little to no ubiquitin was detected from Ub genes bearing a target codon at position 11, while control experiments demonstrated that ubiquitin is produced from a ‘wildtype’ gene that does not contain any target codons (FIG. 3B). Thus, none of the target codons are read by the endogenous translational machinery in Syn61Δ3. This further demonstrates that all of the target codons are orthogonal in this strain.

[0593] Upon addition of a ncAA substrate for the MmPyIRS/MmtRNA^{Pyl} pair (N^{ε}-((tert-butoxy) carbonyl)-L-lysine (Bock)) (25), ubiquitin was produced at levels comparable to wildtype controls (FIG. 3B, Data file S4). ESI-MS and MS/MS demonstrated the genetically directed incorporation of Bock at position 11 of Ub in response to each target codon using the complementary MmPyIRS/MmtRNA^{Pyl}_{YYY} pair (FIG. 3C, FIG. 9A). Additional experiments demonstrated efficient incorporation of ncAAs in response to sense and stop codons in GST-MBP (FIG. 10, Data file S4). The inventors demonstrated good yields of Ub-His₆ incorporating 2, 3, or 4 ncAAs into a single polypeptide in response to each of the target codons (Data file S4, FIGS. 3D-3I, and FIGS. 9B-9G), and further demonstrated the incorporation of 9 ncAAs in response to 9 TCG codons in a single repeat protein (FIGS. 11A and 11B). Together, these results demonstrated that the sense codons TCG and TCA, and the stop codon TAG, can be efficiently reassigned to ncAAs in Syn61Δ3 derivatives.

Encoding Distinct ncAAs in Response to Distinct Target Codons

[0594] Next, the inventors assigned TCG, TCA and TAG codons to distinct ncAAs in Syn61Δ3(ev4) using engineered mutually orthogonal aaRS/tRNA pairs that recognize distinct ncAAs and decode distinct codons (FIG. 4A, FIGS. 12A-12E). The inventors incorporated two distinct ncAAs into ubiquitin in response to TCG and TAG codons (FIG. 4B, FIGS. 13A and 13B), and demonstrated the incorporation of two distinct ncAAs at four sites in ubiquitin, with each ncAA incorporated at two different sites in the protein (FIGS. 4B and 4C, FIGS. 13C-13E, and Data file S4). The inventors incorporated three distinct ncAAs into ubiquitin, in response to TCG, TCA and TAG codons (FIGS. 4D and 4E, and FIG. 13F). The inventors demonstrated the generality of their approach by synthesizing seven distinct versions of ubiquitin, each of which incorporated three distinct ncAAs (FIGS. 14A-14C, FIGS. 15A-15F, and Data file S4).

### Encoded Non-Canonical Polymers and Macrocycles

[0595] For a linear polymer composed of two distinct monomers (A and B) there are four elementary polymerization steps (A+B->AB, B+A->BA, A+A->AA, B+B->BB) from which any sequence can be composed (FIG. 5A). For ribosome-mediated polymerization these four elementary steps correspond to each monomer acting as an A-site or P-site substrate to form a bond with another copy of the same monomer or with a distinct monomer (FIG. 5A). The inventors encoded each elementary step by inserting TCG-TCG (encoding AA; monomer A was arbitrarily assigned to the TCG codon in this nomenclature), TAG-TAG (encoding BB; monomer B was assigned to the TAG codon), TCG-TAG (encoding AB) and TAG-TCG (encoding BA) at codon 3 of a sfGFP gene. The inventors demonstrated the elementary steps for three pairs of monomers: A=Bock, B=p-IPhe; A=CbzK, B=p-I-Phe; A=Ne-allyloxycarbonyl-L-lysine (Allock), B=CbzK (FIG. 5B, FIGS. 16A-16G). The inventors genetically encoded six entirely non-natural tetrameric sequences and a hexameric sequence for each pair of monomers, as well as an octameric sequence for the Allock, CbzK pair (22 synthetic polymer sequences in total) (FIGS. 16A-16G, FIGS. 5C-5E, and FIGS. 17A-17C). All encoded polymerizations were ncAA dependent (FIGS. 16A-16G, FIGS. 5C-5E, and FIG. 17B) and ESI-MS confirmed that the inventors had synthesized the non-canonical hexamers and octamers as sfGFP fusions (FIG. 5F, FIG. 17C). The inventors encoded tetramer and hexamer sequences composed of AllocK and CbzK between SUMO and GyrA-CBD and purified the free polymers (FIGS. 5G-51, and FIG. 18). Finally, the inventors encoded the synthesis of a non-natural macrocycle reminiscent of the products of non-ribosomal peptide synthetases (FIGS. 5G and 5J).

TABLE 1
(“Data file S4”)-Expression Yields

| | | | | Fraction | | |
|---|---|---|---|---|---|---|
| | | | | Full- | Yield | % of |
| Reporter | aaRS/tRNA | ncAA | Cells | length | (mg/L) | WT |
| Wildtype | MmPylRS/ | (—) | Syn61Δ3 | | 9.7 | 100.0 |
| Ubiquitin | MmtRNAPyl(CGA) | | (ev5) | | | |
| Wildtype | MmPylRS/ | (—) | MDS42 | | 10.4 | 107.2 |
| Ubiquitin | MmtRNAPyl(CGA) | | | | | |
| Single Ub- | MmPylRS/ | Bock | Syn61Δ3 | | 10.8 | 111.7 |
| 11TCG | MmtRNAPyl(CGA) | (5 mM) | (ev5) | | | |
| Single Ub- | MmPylRS/ | Bock | Syn61Δ3 | | 8.6 | 88.4 |
| 11TCA | MmtRNAPyl(UGA) | (5 mM) | (ev5) | | | |
| Single Ub- | MmPylRS/ | Bock | Syn61Δ3 | | 8.3 | 85.9 |
| 11TAG | MmtRNAPyl(CUA) | (5 mM) | (ev5) | | | |
| Double Ub- | MmPylRS/ | Bock | Syn61Δ3 | | 14.1 | 145.5 |
| 11TCG/65TCG | MmtRNAPyl(CGA) | (5 mM) | (ev5) | | | |
| Double Ub- | MmPylRS/ | Bock | Syn61Δ3 | | 8.3 | 85.8 |
| 11TCA/65TCA | MmtRNAPyl(UGA) | (5 mM) | (ev5) | | | |
| Double Ub- | MmPylRS/ | Bock | Syn61Δ3 | | 9.0 | 92.9 |
| 11TAG/65TAG | MmtRNAPyl(CUA) | (5 mM) | (ev5) | | | |
| Triple Ub- | MmPylRS/ | Bock | Syn61Δ3 | | 10.6 | 109.1 |
| 11TCG/14TCG/ | MmtRNAPyl(CGA) | (5 mM) | (ev5) | | | |
| 65TCG | | | | | | |
| Triple Ub- | MmPylRS/ | Bock | Syn61Δ3 | | 5.8 | 59.5 |
| 11TCA/14TCA/ | MmtRNAPyl(UGA) | (5 mM) | (ev5) | | | |
| 65TCA | | | | | | |
| Triple Ub- | MmPylRS/ | Bock | Syn61Δ3 | | 1.5 | 15.1 |
| 11TAG/14TAG/ | MmtRNAPyl(CUA) | (5 mM) | (ev5) | | | |
| 65TAG | | | | | | |
| Quadruple Ub- | MmPylRS/ | Bock | Syn61Δ3 | | 2.6 | 27.1 |
| 9TCG/11TCG/ | MmtRNAPyl(CGA) | (5 mM) | (ev5) | | | |
| 14TCG/65TCG | | | | | | |
| Quadruple Ub- | MmPylRS/ | Bock | Syn61Δ3 | | 2.1 | 21.8 |
| 9TCA/11TCA/ | MmtRNAPyl(UGA) | (5 mM) | (ev5) | | | |
| 14TCA/65TCA | | | | | | |
| Quadruple Ub- | MmPylRS/ | Bock | Syn61Δ3 | | 2.8 | 28.9 |
| 9TAG/11TAG/ | MmtRNAPyl(CUA) | (5 mM) | (ev5) | | | |
| 14TAG/65TAG | | | | | | |
| | | | | | | 0.0 |
| Double Ub- | | CbzK | Syn61Δ3 | | 7.4 | 76.7 |
| 11TCG/65TAG | | (2 mM)/ | (ev5) | | | |
| | | p-I-Phe | | | | |
| | | (2 mM) | | | | |
| Double-Double | | CbzK | Syn61Δ3 | | 1.6 | 16.7 |
| Ub-11TCG/ | | (2 mM)/ | (ev5) | | | |
| 14TCG/57TAG/ | | p-I-Phe | | | | |
| 65TAG | | (2 mM) | | | | |
| Wildtype | 1R26PylRS/ | CbzK | Syn61Δ3 | | 7.7 | 79.5 |
| Ubiquitin | AlvtRNAΔNPyl | (2 mM)/ | (ev5) | | | |
| | (8)(CGA); AfTyrRS(p-I- | p-I-Phe | | | | |
| | Phe)/AftRNATyr | (2 mM)/ | | | | |
| | (A01)(CUA); MmPylRS/ | Bock | | | | |
| | MmtRNAPyl(UGA) | (5 mM) | | | | |
| Triple Ub-9TAG/ | 1R26PylRS/ | CbzK | Syn61Δ3 | | 2.8 | 28.7 |
| 11TCG/14TCA | AlvtRNAΔNPyl | (2 mM)/ | (ev5) | | | |
| | (8)(CGA); AfTyrRS(p-I- | p-I-Phe | | | | |
| | Phe)/AftRNATyr | (2 mM)/ | | | | |
| | (A01)(CUA); MmPylRS/ | Bock | | | | |
| | MmtRNAPyl(UGA) | (5 mM) | | | | |
| Triple Ub-9TAG/ | 1R26PylRS/ | CbzK | Syn61Δ3 | | 3.1 | 31.7 |
| 11TCG/14TCA | AlvtRNAΔNPyl | (2 mM)/ | (ev5) | | | |
| | (8)(CGA); AfTyrRS(p-I- | p-I-Phe | | | | |
| | Phe)/AftRNATyr | (2 mM)/ | | | | |
| | (A01)(CUA); MmPylRS/ | Allock | | | | |
| | MmtRNAPyl(UGA) | (5 mM) | | | | |
| Triple Ub-9TAG/ | 1R26PylRS/ | CbzK | Syn61Δ3 | | 3.5 | 35.9 |
| 11TCG/14TCA | AlVARNAΔNPyl | (2 mM)/ | (ev5) | | | |
| | (8)(CGA); AfTyrRS(p-I- | p-I-Phe | | | | |
| | Phe)/AftRNATyr | (2 mM)/ | | | | |
| | (A01)(CUA); MmPylRS/ | CypK | | | | |
| | MmtRNAPyl(UGA) | (5 mM) | | | | |
| Triple Ub- | 1R26PylRS/ | CbzK | Syn61Δ3 | | 5.9 | 60.8 |
| 9TAG/11TCG/ | AlvtRNAΔNPyl | (2 mM)/ | (ev5) | | | |
| 14TCA | (8)(CGA); AfTyrRS(p-I- | p-I-Phe | | | | |
| | Phe)/AftRNATyr | (2 mM)/ | | | | |
| | (A01)(CUA); MmPylRS/ | AlkK | | | | |
| | MmtRNAPyl(UGA) | (5 mM) | | | | |
| Triple Ub-9TAG/ | MmPylRS/ | Allock | Syn61Δ3 | | 3.0 | 31.0 |
| 11TCG/14TCA | MmtRNAPyl(UGA); | (2 mM)/ | (ev5) | | | |
| | MjTyrRS(p-Az-Phe)/ | CbzK | | | | |
| | MjtRNATyr(CUA); | (2 mM)/ | | | | |
| | 1R26PylRS/ | p-Az-Phe | | | | |
| | AlvtRNAΔNPyl | (2 mM) | | | | |
| | (8)(UGA) | | | | | |
| Triple Ub-9TAG/ | MmPylRS/ | AlkK | Syn61Δ3 | | 0.9 | 9.1 |
| 11TCG/14TCA | MmtRNAPyl(UGA); | (2 mM)/ | (ev5) | | | |
| | MjTyrRS(p-Az-Phe)/ | CbzK | | | | |
| | MjtRNATyr(CUA); | (2 mM)/ | | | | |
| | 1R26PylRS/ | p-Az-Phe | | | | |
| | AlvtRNAΔNPyl | (2 mM) | | | | |
| | (8)(UGA) | | | | | |
| Triple Ub-9TAG/ | MmPylRS/ | Allock | Syn61Δ3 | | 3.8 | 38.7 |
| 11TCG/14TCA | MmtRNAPyl(UGA); | (2 mM)/ | (ev5) | | | |
| | MjTyrRS(3-Nitro-Tyr)/ | CbzK | | | | |
| | MjtRNATyr(CUA); | (2 mM)/ | | | | |
| | 1R26PylRS/ | 3-Nitro-Tyr | | | | |
| | AlvtRNAΔNPyl | (2 mM) | | | | |
| | (8)(UGA) | | | | | |
| Wildtype GST- | MmPylRS/ | (—) | Syn61Δ3 | 0.92 | 23.1 | 100.1 |
| MBP | MmtRNAPyl(CGA) | | (ev5) | | | |
| GST-TCG-MBP | MmPylRS/ | Bock | Syn61Δ3 | 0.86 | 21.6 | 93.7 |
| | MmtRNAPyl(CGA) | (5 mM) | (ev5) | | | |
| GST-TAG-MBP | MmPylRS/ | Bock | Syn61Δ3 | 0.82 | 17.6 | 76.3 |
| | MmtRNAPyl(CUA) | (5 mM) | (ev5) | | | |
| Wildtype GST- | MmPylRS/ | (—) | MDS42 | 0.96 | 24.8 | 107.4 |
| MBP | MmtRNAPyl(CGA) | | | | | |
| GST-TCG-MBP | MmPylRS/ | (—) | MDS42 | 0.93 | 21.3 | 92.0 |
| | MmtRNAPyl(CGA) | | | | | |
| GST-TAG-MBP | MmPylRS/ | Bock | MDS42 | 0.44 | 6.1 | 26.4 |
| | MmtRNAPyl(CUA) | (5 mM) | | | | |
| SUMO- | MmPylRS/ | (—) | Syn61Δ3 | | 68.8 | 100.0 |
| GSGSGSGS- | MmtRNAPyl(CGA); | | (ev5) | | | |
| GyrA-CBD | 1R26PylRS/ | | | | | |
| | AlvtRNAΔNPyl | | | | | |
| | (8)(CUA) | | | | | |
| SUMO-TCG/ | MmPylRS/ | Allock | Syn61Δ3 | | 38.8 | 56.4 |
| TAG/TCG/TAG- | MmtRNAPyl(CGA); | (2 mM)/ | (ev5) | | | |
| GyrA-CBD | 1R26PylRS/ | CbzK | | | | |
| | AlvtRNAΔNPyl | (2 mM) | | | | |
| | (8)(CUA) | | | | | |
| SUMO-TCG/ | MmPylRS/ | Allock | Syn61Δ3 | | 13.6 | 19.8 |
| TAG/TCG/ | MmtRNAPyl(CGA); | (2 mM)/ | (ev5) | | | |
| TAG/TCG/ | 1R26PylRS/ | CbzK | | | | |
| TAG-GyrA- | AlvtRNAΔNPyl | (2 mM) | | | | |
| CBD | (8)(CUA) | | | | | |
| SUMO- | MmPylRS/ | (—) | Syn61Δ3 | | 40.4 | 100.0 |
| CGSGSGSGS- | MmtRNAPyl(CGA); | | (ev5) | | | |
| GyrA-CBD | 1R26PylRS/ | | | | | |
| | AlvtRNAΔNPyl | | | | | |
| | (8)(CUA) | | | | | |
| SUMO-C-TCG/ | MmPylRS/ | Allock | Syn61Δ3 | | 29.2 | 72.3 |
| TAG/TCG/ | MmtRNAPyl(CGA); | (2 mM)/ | (ev5) | | | |
| TAG-GyrA-CBD | 1R26PylRS/ | CbzK | | | | |
| | AlvtRNAΔNPyl | (2 mM) | | | | |
| | (8)(CUA) | | | | | |

### Materials and Methods—for Example 3

### Construction of Vectors for Expressing Ubiquitin and GFP

[0596] All cloning was conducted in E. coli DH10b. The plasmids for expressing ubiquitin (Ub) or sfGFP were constructed based upon a pBAD expression system (37). Recoded wild-type ubiquitin, sfGFP, apra^{R}, and araC were ordered as gBlocks (IDT). The plasmids were then constructed through a 4-piece assembly with HiFi DNA Assembly Mix (NEB), where the overlapping fragments were i) either recoded wild-type Ub or sfGFP, ii) recoded apra^{R}, iii) recoded araC, and iv) the pBAD vector origin region, amplified by PCR. This generated plasmids pBAD_Ub-wt_rec and pBAD_sfGFP-wt_rec. Variants of these plasmids where TCG, TCA or TAG codons were introduced into the Ub or sfGFP genes were generated by site-directed mutagenesis of pBAD_Ub-wt_rec and pBAD_sfGFP-wt_rec. See Data file S2 for sequence details of all plasmids.

Construction of aaRS/tRNA Plasmids for Decoding TCG, TCA, or TAG Codons

[0597] All cloning was conducted in E. coli DH10b. For incorporating one type of ncAA, the inventors used a pMB1-based plasmid encoding the aaRS/tRNA pair that directs ncAA incorporation. For tRNA^{Pyl} constructs with anticodons CGA and UGA, the inventors designed pylT tRNA genes (including pylTopt mutations from ref (38)) such that the entire anticodon stem loop (ASL—the anticodon plus 6 nucleotides on either side) was replaced by the ASL sequence of serU (in the case of CGA) or serT (in the case of UGA) E. coli genes.

[0598] pMB1-based aaRS/tRNA plasmids were constructed by HiFi Assembly of multiple fragments, including i) a recoded aaRS under control of the constitutive gInS promoter, synthesized as a gBlock (IDT), ii) a tRNA gene placed in between an Ipp promoter and an rrnC terminator, synthesized as a gBlock (IDT), iii) a recoded kan^{R} gene, and iv) a pMB1 vector origin amplified by PCR from a previously described pMB1-based plasmid (37). With this strategy the plasmids pMB1_MmPyIRS_tRNA-Pyl-opt(CGA/UGA/CUA) were assembled. All plasmid sequences are available via their Genbank accessions listed in Data file S2.

Design and Construction of Plasmids Encoding aaRS/tRNA Pairs for Double or Triple ncAA Incorporations

[0599] For double and triple distinct ncAA incorporation experiments, the inventors designed plasmids polycistronically encoding two aaRS/tRNA pairs (16). The inventors placed the two aaRS CDSs downstream of a gInS promoter; the intergenic region between the aaRS genes was optimized with an RBS calculator program. Both tRNA genes were placed downstream of a Ipp promoter. The intergenic regions between tRNA genes were based upon the intergenic regions between the alaX and alaW genes in the E. coli genome.

[0600] To construct the plasmids encoding two aaRS/tRNA pairs, the inventors ordered recoded aaRS genes preceded by their corresponding RBS sequences as individual gBlocks (IDT). The polycistronic tRNAs, along with the Ipp promoter, rrnC terminator and intergenic region, were ordered as a single gBlock (IDT). The inventors assembled synthetic DNA fragments encoding aaRS genes and tRNAs together with a pMB1 backbone containing kan^{R} (described above) by HiFi Assembly (NEB). This way the inventors generated plasmids pMB1_1R26PyIRS(CbzK)_AfTyrRS(p-I-Phe)_AlvtRNA-ΔNPyl(8)(CGA)_AftRNA-Tyr(A01)(CUA), pMB1_MmPyIRS_1R26PyIRS(CbzK)_MmtRNAPyl-opt(CGA)_AMvtRNA-ΔNPyl(8)(CUA), pMB1_MmPyIRS_AfTyrRS(p-I-Phe)_MmtRNA-Pylopt(CGA)-AftRNA-Tyr(A01)(CUA) and pMB1_MmPyIRS_1R26PyIRS(CbzK)_MmtRNA-Pylopt(CGA)_AMvtRNA-ANPyl(8)(UGA). Plasmid sequences are available via their Genbank accessions listed in Data file S2.

[0601] For incorporating three distinct ncAAs, the inventors used pMB1_MmPyIRS_tRNA-Pyl-opt(UGA) as a template to PCR-amplify a DNA fragment encompassing i) MmPyIRS under control of a ginS promoter and ii) a pylT-serT(UGA) chimeric tRNA gene (see above) between an Ipp promoter and an rrnC terminator. The inventors then used site-directed mutagenesis to separately created an intermediate pBAD_Ub derivative where codon positions 9, 11 and 14 of ubiquitin are substituted with TAG, TCG and TCA respectively. Next, the MmPyIRS/pylTserT(UGA) fragment was inserted downstream of the ubiquitin gene in the intermediate plasmid by HiFi Assembly. Finally, site-directed mutagenesis was performed in the resulting plasmid with primers that directed the introduction of ‘opt’ mutations into the sequence of tRNA^{Pyl} as in ref (38), to generate pBAD_Ub9TAG11TCG14TCA-MmPyIRS_MmtRNA-Pyl-opt(UGA). The inventors used this plasmid as a starting point to create pBAD_Ub9TAG11TCG14TCA-MjTyrRS(p-Az-Phe)_tRNA-Mj-Tyr(CUA) and pBAD_Ub9TAG11TCG14TCA-MjTyrRS(3-Nitro-TyrRS)_tRNA-Mj-Tyr(CUA), by replacing the aaRS/tRNA pair of the parent plasmid with recoded synthetic DNA fragments of MjTyrRS(p-Az-Phe) or MjTyrRS(3-Nitro-TyrRS), or their corresponding tRNAs, by HiFi assembly. The sequences are detailed in Data file S2.

[0602] Experiments describing the incorporation of Bock and p-I-Phe into sfGFP (FIGS. 5C and 5F) used derivatives of pBAD_sfGFP_MmPyIRS_MmtRNA-Pyl-opt(CGA). Starting from pBAD_Ub9TAG11TCG14TCA-MmPyIRS_MmtRNA-Pyl-opt(UGA), the inventors replaced the Ub gene with wild-type sfGFP by HiFi Assembly. The inventors subsequently derivatized position 3 of sfGFP by introducing the different codon combinations by site-directed mutagenesis. Finally, site-directed mutagenesis was used to replace the ASL in each of the resulting plasmids from serT to serU, generating a set of pBAD_sfGFP_MmPyIRS_MmtRNA-Pyl-opt(CGA) derivatives (see Data file S2 for the full list of plasmids).

### Western Blot Analyses of Syn61 Expressions of Ubiquitin Containing Target Codons

[0603] For expressing ubiquitin variants, the inventors co-transformed 60 μL of electrocompetent Syn61Δ3, Syn61Δ3(ev3) or Syn61Δ3(ev4) cells with a pMB1_MmPyIRS_tRNA-Pyl-opt(YYY) plasmid (with either serU(CGA), serT(UGA) or CUA anticodon, see Data file S2) and the relevant pBAD_Ub plasmid (1 μL per plasmid). Electroporated cells were recovered in 1 mL of prewarmed SOB at 37° C. while shaking at 1000 rpm on a benchtop thermomixer (Eppendorf) for 1h 30 min. Following recovery, 1 mL of cells were diluted into 6 mL of pre-warmed 2xYT containing 50 μg/mL kanamycin and 50 μg/mL apramycin. The diluted cells were then incubated for 18 h at 37° C. while shaking at 220 rpm. Expression of ubiquitin was initiated by diluting the overnight culture 1:100 into 5-50 ml of pre-warmed 2xYT containing 50 μg/mL kanamycin, 50 μg/mL apramycin, 0.2% L-arabinose (w/v), and either 0 mM or 5 mM (Bock). After 8 hours of expression at 37° C. with shaking at 220 rpm, the cells were harvested by centrifugation (4,000×g 20 min), and the pellet was frozen at −20° C. until further use. For western blot analyses post-expression, the inventors harvested 5×10⁷ cells (assuming that OD₆₀₀ of 1.0=1·10⁹ cells/mL with 1 cm pathlength) by centrifugation (10000×g, 1 min) in a 1.5 mL microcentrifuge tube. The cell pellet was resuspended in 50 μL of 1x LDS sample buffer (BioRad) with 5% B-mercaptoethanol, boiled at 95° C. for 5 min, and then vortexed for 5 min. 10 μL of each sample was loaded into a 4-12% Bis-Tris NuPAGE SDS-PAGE gel (Invitrogen) and electrophoresed for 45 min at 180 V. Transfer to a PVDF membrane was accomplished with an iBlot 2 semi-wet transfer system. The membrane was then blocked for 30 min with 5 mL of Odyssey Blocking Buffer, followed by incubation with 5 mL of anti-His-tag primary antibody (Abcam, cat. no. ab18184) diluted 1:1000 in blocking buffer with 0.2% Tween-20. After 1 hour at room temperature, the membrane was washed three times for 5 min each with 5 mL of PBS containing 0.2% Tween-20. The secondary antibody was added at 1:15000 dilution in a 5 mL volume, diluted into a 50/50 mix of blocking buffer and 0.2% Tween-20, supplemented with 0.01% SDS. The secondary antibody (IRDye 925-68070, LiCor) was incubated for 30 min at room temperature, followed by three washes of 5 min each with 5 mL of PBS containing 0.2% Tween-20. Imaging of western blots was performed on a Typhoon Trio phosphorimager (GE Life Sciences).

### Gfp Expression Measurements

[0604] The inventors performed expression of recoded sfGFP genes bearing single or multiple TCG, TCA, or TAG codons in the same media conditions as the expressions from Ubiquitin genes (see section above). Briefly, 50 μL of cells (Syn61Δ3(ev4)) were co-electroporated with both a pMB1-based aaRS/tRNA plasmid (1 μL) as well as a pBAD_sfGFP reporter plasmid (1 μL). The transformed cells were recovered for 1h 30 min in 1 mL of SOB while shaking at 1000 rpm at 37° C., and subsequently the entire 1 mL of cells were inoculated into 6 mL of 2xYT containing 50 μg/mL kanamycin and 50 μg/mL apramycin and incubated overnight at 37° C. while shaking at 220 rpm. The inventors performed expressions in 96-well microtiter plate format, inoculating overnight cultures 1:100 into 0.5 mL of 2xYT containing kanamycin (50 μg/mL), apramycin (50 μg/mL), Larabinose (0.2%), and the presence or absence of 2 mM ncAA. The 96-well plates were incubated for 16 hours at 37° C. while shaking at 750 rpm in a Thermo-Shaker (Grant-bio). After centrifugation for 10 min at 3200 g, cell pellets were resuspended in 150 μL of PBS. To measure GFP expression normalized by cell density, 100 μL of resuspended cells was transferred to a Costar clear 96-well flat-bottom plate, and OD600 and GFP fluorescence (Aex: 485 nm; Aem: 520 nm) measurements were recorded on a PHERAstar FS plate reader (BMG LABTECH) with the gain set to 200 and the focal adjustment at 3.5 mm.

Purification of His₆x-Tagged Reporter Proteins from E. Coli

[0605] Cells (Syn61Δ3(ev4) or Syn61Δ3(ev5)) harbouring i) a pMB1-based plasmid carrying aaRS/tRNA pairs and ii) a pBAD_sfGFP or pBAD_Ub derivative were grown overnight at 37° C. with shaking at 220 rpm. Overnight cultures were prepared in 10 mL volumes for reporters containing a single target codon and larger volumes (20-50 mL) for those containing multiple codons. Expression cultures were centrifuged for 10 min at 4000×g, the pellets were chilled on ice and then the cells were resuspended in 1/20th of the original culture volume of lysis buffer (1×PBS, 1× Bugbuster® Protein Extraction Reagent (Novagen®), 50 μg/mL DNase 1, 100 μg/mL lysozyme, 1 mM PMSF, and 20 mM imidazole). The cell resuspensions were incubated for 30 min at 4° C., and the lysates were then clarified by centrifugation (16000×g, 4° C., 30 min). The clarified lysate supernatant was then transferred to fresh microcentrifuge tubes containing 50-100 μL of Ni²⁺-NTA slurry (Qiagen). The Ni²⁺-NTA mixture was incubated for 1 h at 4° C. while tumbling gently. The inventors collected the Ni²⁺-NTA beads gravity filtration on a fritted column and resuspended them in 500 μL of wash buffer (PBS, 40 mM imidazole, pH 8); three washes were performed. To elute polyhistidine-tagged proteins, the inventors subsequently resuspended the washed beads in 100 μL of elution buffer (PBS, 300 mM imidazole, pH 8). Following centrifugation (1000×g, 4° C., 1 min), the supernatant with eluted proteins was transferred into fresh microcentrifuge tubes, and the elution procedure repeated three times. To quantify protein expression yields (mg/L), the inventors used the Qubit™ Protein Assay kit (ThermoScientific) according to the manufacturer's protocol and stored purified proteins at −20° C. prior to subsequent analyses.

Purification of GST-Tagged Reporter Proteins from E. coli

[0606] Cells were prepared in 10 mL volumes in an identical manner as to the His₆-tagged reporter expressions, except the lysates were incubated with 100 μL of Glutathione Sepharaose™ 4B beads (GE Healthcare) according to the manufacturers' protocol. Following 1 h incubation at 4° C. with gentle agitation, the inventors washed the beads three times with 1 mL of PBS. The inventors then eluted GST-tagged proteins bound to the beads with 150 μL of 10 mM reduced glutathione in 50 mM Tris-HCl pH 8.0. Eluted proteins were mixed to a final concentration of 1× LDS sample buffer (BioRad) and 10 μL of each sample was then loaded into a 4-12% Bis-Tris NuPAGE gel. Following electrophoresis, the gel was stained with InstantBlue (Expedeon) for 30 min followed by a rinse with water.

### Construction of Vectors for Expressing His₆-SUMO-ncPeptide-GyrA

[0607] Recoded wild-type GyrA-CBD and His₆-SUMO were ordered as gBlocks (IDT). The plasmids were assembled in a 4-piece assembly with HiFi DNA Assembly Mix (NEB), where the overlapping fragments contained a GS4 linker between SUMO and GyrA. The assembly contained i) PCR amplified GS₄-GyrA-CBD; ii) His₆-SUMO-GS₄; iii) a DNA fragment containing the MmPyIRS/MmtRNA^{Pyl}_{CGA}) pair; and iv) the pBAD backbone amplified by PCR from pBAD_Ub-wt_rec. This generated plasmid pBAD_SUMO-GS₄-GyrACBD_MmPyIRS_MmtRNA-Pyl-opt (CGA). Variants of this plasmid where the noncanonical peptide encoding sequence and/or a cysteine codon is embedded between SUMO and GyrA, were generated by site-directed mutagenesis. See Data file S2 for sequence details of all plasmids.

### Expression of His₆-SUMO-ncPeptide-GyrA-CBD Fusion Protein

[0608] The inventors transformed 60 μL of electrocompetent Syn61Δ3 (ev5) cells containing the pMB1_MmPyIRS_1R26PyIRS(CbzK)_MmtRNA-Pyl-opt(CGA)_AlvtRNA-ΔNPyl(8)(CUA) plasmid with a pBAD_SUMO-XXX-GyrA-CBD_MmPyIRS_MmtRNA-Pyl-opt(CGA) or pBAD_SUMO-Cys-XXX-GyrA-CBD_MmPyIRS_MmtRNA-Pyl-opt(CGA) derivative (XXX denotes the coding sequence for the target peptide). The electroporated cells were recovered in 1 mL SOB at 37° C. while shaking with 200 rpm, after 2 h the cells were diluted in 20 ml 2xYT containing 50 μg/mL kanamycin and 50 μg/mL apramycin. The expression culture was inoculated by addition of the grown preculture into 500 mL TB medium, maintaining the antibiotic selection. The TB culture was grown at 37° C. while being agitated (200 rpm) to an OD₆₀₀ of 2.5-3.0 (˜12 h). Expression was induced by addition of 0.4% L-arabinose and 2 mM of both ncAAs (Allock, CbzK) was added. After 14 h the culture was partitioned into 250 mL aliquots and the cells harvested by centrifugation (4000 rpm, 20 min, 4° C.). The cell pellets were washed with PBS and stored at −20° C.

### Purification of His₆-SUMO-ncPeptide-GyrA-CBD Fusion Protein and Peptide Excision

[0609] The frozen cell aliquots were thawed and resuspended in ice cold MES buffer (20 mM MES pH 6.9, 150 mM NaCl), supplemented with DNAse (0.01 mg/mL) and Lysozyme (0.1 mg/mL). The resuspended cells were passed through a pneumatic homogenizer twice and the lysate cleared by centrifugation (25000 rpm, 25 min). The supernatant was mixed with 1 mL of Ni²⁺-NTA slurry (50% beads in 20% ethanol) and incubated for 1 h at 4° C. under gentle agitation. Using a Poly-Prep column (BioRad) the Ni²⁺-NTA agarose was separated from the supernatant through gravity filtration. The filtrate was washed with 30 mL of MES buffer supplemented with 30 mM imidazole and the protein subsequently eluted in 2 mL of MES buffer containing 200 mM imidazole. The eluate was concentrated to approximately 10 mg/mL and the buffer exchanged to MES buffer. 4 mg of protein (˜100 μg of peptide) was used in each excision reaction, which were prepared in 500 μL MES buffer containing 10 or 200 mM DTT (cyclisation or DTT induced cleavage) and 0.04 mg Ulp1. The reaction was incubated at 37° C. and the reaction progress was monitored by LC-MS, upon completion (18-48 h) the free peptide was purified either by C18 spin column purification (linear AllocK/CbzK tetramer) or hot, acidic methanol extraction (linear AllocK/CbzK hexamer, cyclic AllocK/CbzK tetramer).

[0610] For C18 spin column (Pierce™) purifications, a protocol was essentially performed as described in the manufacturer's instructions, the only modification being an additional washing step with 70% ACN, 0.1% AcOH to remove proteins and substituting the elution buffer with 90% MeOH, 0.2% AcOH. Briefly, the sample was mixed with 4x sample buffer (20% ACN, 2% AcOH) and loaded in 200 μL portions onto the activated and equilibrated C18 spin column. The reaction was passed twice over the column by centrifugation at 1500×g for 30 s. Then the column was washed twice with 200 μL wash buffer (5% ACN and 0.5% AcOH) and once with 200 μL protein wash buffer (70% ACN, 0.2% AcOH). The peptide was then eluted in 2× 20 μL 90% MeOH, 0.2% AcOH, and the methanol was evaporated under an air stream (not to dryness). The sample was then refilled to the initial volume with 0.2% AcOH and analyzed by ESI-MS.

[0611] For hot, acidic methanol extractions, the linear AllocK/CbzK hexamer and cyclic AllocK/CbzK tetramer peptides precipitate from the reaction mixture and can be collected by centrifugation (5 min, 20000 rpm), the supernatant was discarded. The peptides were resolubilized in 200 μL of 90% methanol 1% AcOH for 2 h at 55° C. (prolonged incubation increases the loss of Alloc and Cbz protection groups). The samples were reduced to 40 μL by evaporation under an air stream; at this point the methanol concentration was maintained above >20% to ensure solubility. The samples were analysed as described above for the linear AllocK/CbzK tetramer peptide.

### Intact Protein Mass Spectrometry

[0612] The inventors carried out ESI-MS using a Waters Xevo G2 mass spectrometer equipped with a modified nanoAcquity LC system. Briefly, injected proteins were separated on a BEH C4 UPLC column (1.7 μm; 1.0×100 mm; Waters) with a flowrate of 50 μL/min. The pump delivered an acetonitrile gradient starting at 2% vol/vol to 80% vol/vol (0.1% vol/vol formic acid) over 20 minutes. The column outlet was directly interfaced via an electrospray ionization source with a hybrid quadrupole time-of-flight mass spectrometer (Waters). While using a cone voltage of 30 V, data were acquired in positive ion mode with a range from 300-2000 m/z. Scans were deconvoluted using the MaxEnt1 function within MassLynx software (Waters). The inventors calculated theoretical wild-type protein molecular weights with GPMAW (Lighthouse Data) software and edited them manually to accommodate the molecular weights of ncAAs.

Tandem Mass Spectrometry (MS/MS) of ncAA-Containing Tryptic Peptides

[0613] The inventors purified ubiquitin or GFP proteins containing ncAAs by virtue of their C-terminal His₆ tag, as described above, and ran the purified samples on 4-12% NuPAGE Bis-Tris gels (Invitrogen). Following InstantBlue (Expedeon) staining, the inventors excised gel pieces migrating at the approximate molecular weight of the predicted target protein and subjected them to in-gel trypsin digestion as described previously (37)). Excised protein gel pieces were destained with 50% v/v acetonitrile with 50 mM ammonium bicarbonate. After reduction with 10 mM DTT and alkylation with 55 mM iodoacetamide, the proteins were digested overnight at 37° C. with 6 ng/μL of trypsin (Promega, UK). Tryptic peptides were extracted in 2% v/v formic acid with 2% v/v acetonitrile and subsequently analyzed by nano-scale capillary LC-MS/MS with an Ultimate U3000 HPLC (ThermoScientific Dionex, San Jose, USA) set to a flowrate of 300 nL/min. Peptides were trapped on a C18 Acclaim PepMap100 5 μm, 100 μm×20 mm nano Viper (ThermoScientific Dionex, San Jose, USA) prior to separation on a C18 T3 1.8 μm, 75 μm×250 mm nanoEase column (Waters, Manchester, UK). A gradient of acetonitrile eluted the peptides, and the analytical column outlet was directly interfaced using a nano-flow electrospray ionization source, with a quadrupole Orbitrap mass spectrometer (Q-Exactive HFX, ThermoScientific, USA). For data-dependent analysis a resolution of 60,000 for the full MS spectrum was used, followed by twelve MS/MS. MS spectra were collected over a m/z range of 300-1,800. The resultant LC-MS/MS spectra were searched against a protein database (UniProt KB) using the Mascot search engine program. The database search parameters were restricted to a precursor ion tolerance of 5 p.p.m with a fragmented ion tolerance of 0.1 Da. The inventors set multiple modifications in the search parameters: two missed enzyme cleavages, variable modifications for methionine oxidation, cysteine carbamidomethylation, pyroglutamic acid, lysine to ncAA, threonine to ncAA, and serine to ncAA (ncAA variable based upon experiment). The proteomics software Scaffold 4 was used to visualize the fragmented spectra.

### Example 4—Discussion

[0614] The inventors have evolved Syn61 and deleted the tRNAs and release factor that decode TCG, TCA and TAG codons. They show that the resulting strain provides complete resistance to a cocktail of viruses. Moreover, they demonstrate the encoded incorporation of non-canonical amino acids (ncAAs) in response to all three codons and the encoded, programmable cellular synthesis of entirely non-canonical heteropolymers and macrocycles.

[0615] Thus, the inventors have synthetically uncoupled their strain from the ability to read the canonical code, and this advance provides a potential basis for bioproduction without the catastrophic risks associated with viral contamination and lysis (26, 27). The inventors note that the synthetic codon compression and codon reassignment strategy that they have implemented is analogous to models proposed for codon capture in the course of natural evolution (28).

[0616] Future work will expand the principles exemplified herein to further compress and reassign the genetic code. The inventors anticipate that—in combination with ongoing advances in engineering the translational machinery of cells (4)—this work will enable the programmable and encoded cellular synthesis of an expanded set of non-canonical heteropolymers with emergent, and potentially useful, properties.

### REFERENCES

[0617] 1. F. H. C. Crick, L. Barnett, S. Brenner, R. J. Watts-Tobin, General Nature of the Genetic Code for Proteins. Nature 192, 1227-1232 (1961).
[0618] 2. P. Marliere, The farther, the safer: a manifesto for securely navigating synthetic species away from the old living world. Systems and Synthetic Biology 3, 77 (2009).
[0619] 3. J. W. Chin, Expanding and reprogramming the genetic code. Nature 550, 53-60 (2017).
[0620] 4. D. de la Torre, J. W. Chin, Reprogramming the genetic code. Nature Reviews Genetics 22, 169-184 (2020).
[0621] 5. T. Passioura, H. Suga, Reprogramming the genetic code in vitro. Trends Biochem Sci 39, 400-408 (2014).
[0622] 6. A. C. Forster et al., Programming peptidomimetic syntheses by translating genetic codes designed de novo. Proc Natl Acad Sci USA 100, 6353-6357 (2003).
[0623] 7. M. J. Lajoie et al., Genomically Recoded Organisms Expand Biological Functions. Science 342, 357-360 (2013).
[0624] 8. N. J. Ma, F. J. Isaacs, Genomic Recoding Broadly Obstructs the Propagation of Horizontally Transferred Genetic Elements. Cell Systems 3, 199-207 (2016).
[0625] 9. G. Korkmaz, M. Holm, T. Wiens, S. Sanyal, Comprehensive analysis of stop codon usage in bacteria and its correlation with release factor abundance. J Biol Chem 289, 30334-30342 (2014).
[0626] 10. D. D. Young, P. G. Schultz, Playing with the Molecules of Life. ACS Chemical Biology 13, 854-870 (2018).
[0627] 11. C. C. Liu, P. G. Schultz, Adding New Chemistries to the Genetic Code. Annual Review of Biochemistry 79, 413-444 (2010).
[0628] 12. Y. Zhang et al., A semi-synthetic organism that stores and retrieves increased genetic information. Nature 551, 644-647 (2017).
[0629] 13. E. C. Fischer et al., New codons for efficient production of unnatural proteins in a semisynthetic organism. Nature Chemical Biology 16, 570-576 (2020).
[0630] 14. H. Neumann, K. Wang, L. Davis, M. Garcia-Alai, J. W. Chin, Encoding multiple unnatural amino acids via evolution of a quadruplet-decoding ribosome. Nature 464, 441-444 (2010).
[0631] 15. K. Wang et al., Optimized orthogonal translation of unnatural amino acids enables spontaneous protein double-labelling and FRET. Nature Chemistry 6, 393-403 (2014).
[0632] 16. D. L. Dunkelmann, J. C. W. Willis, A. T. Beattie, J. W. Chin, Engineered triply orthogonal pyrrolysyl-tRNA synthetase/tRNA pairs enable the genetic encoding of three distinct non-canonical amino acids. Nature Chemistry 12, 535-544 (2020).
[0633] 17. J. S. Italia et al., Mutually Orthogonal Nonsense-Suppression Systems and Conjugation Chemistries for Precise Protein Labeling at up to Three Distinct Sites. Journal of the American Chemical Society 141, 6204-6212 (2019).
[0634] 18. J. Fredens et al., Total synthesis of Escherichia coli with a recoded genome. Nature 569, 514-518 (2019).
[0635] 19. W. H. Schmied et al., Controlling orthogonal ribosome subunit interactions enables evolution of new function. Nature 564, 444-448 (2018).
[0636] 20. M. R. Hemm et al., Small Stress Response Proteins in Escherichia coli: Proteins Missed by Classical Proteomic Studies. Journal of Bacteriology 192, 46 (2010).
[0637] 21. S. Meydan et al., Retapamulin-Assisted Ribosome Profiling Reveals the Alternative Bacterial Proteome. Mol Cell 74, 481-493 e486 (2019).
[0638] 22. A. Katz, S. Elgamal, A. Rajkovic, M. Ibba, Non-canonical roles of tRNAs and tRNA mimics in bacterial cell biology. Mol Microbiol 101, 545-558 (2016).
[0639] 23. Z. Su, B. Wilson, P. Kumar, A. Dutta, Noncanonical Roles of tRNAs: tRNA Fragments and Beyond. Annu Rev Genet 54, 47-69 (2020).
[0640] 24. L. You, P. F. Suthers, J. Yin, Effects of Escherichia coli Physiology on Growth of Phage T7 In Vivo and In Silico. Journal of Bacteriology 184, 1888 (2002).
[0641] 25. T. Yanagisawa et al., Multistep Engineering of Pyrrolysyl-tRNA Synthetase to Genetically Encode Ne-(o-Azidobenzyloxycarbonyl) lysine for Site-Specific Protein Modification. Chemistry & Biology 15, 1187-1197 (2008).
[0642] 26. V. Bethencourt, Virus stalls Genzyme plant. Nature Biotechnology 27, 681-681 (2009).
[0643] 27. J. Zahn, M. Halter, in Surveillance and Elimination of Bacteriophage Contamination in an Industrial Fermentation Process. (2018).
[0644] 28. S. Osawa, T. H. Jukes, Codon reassignment (codon capture) in evolution. Journal of Molecular Evolution 28, 271-278 (1989).
[0645] 29. D. Cervettini, K. C. Liu, J. W. Chin, Scripts for Sense Codon Reassignment Enables Viral Resistance and Encoded Polymer Synthesis. Zenodo, (2021).
[0646] 30. D. Cervettini et al., Rapid discovery and evolution of orthogonal aminoacyl-tRNA synthetase-tRNA pairs. Nature Biotechnology 38, 989-999 (2020).
[0647] 31. A. H. Badran, D. R. Liu, Development of potent in vivo mutagenesis plasmids with broad mutational spectra. Nature Communications 6, 8425 (2015).
[0648] 32. K. Wang et al., Defining synonymous codon compression schemes by genome recoding. Nature 539, 59-64 (2016).
[0649] 33. D. E. Deatherage, J. E. Barrick, Identification of mutations in laboratory-evolved microbes from next-generation sequencing data using breseq. Methods Mol Biol 1151, 165-188 (2014).
[0650] 34. H. Thorvaldsdottir, J. T. Robinson, J. P. Mesirov, Integrative Genomics Viewer (IGV): high-performance genomics data visualization and exploration. Briefings in Bioinformatics 14, 178-192 (2013).
[0651] 35. P. J. A. Cock et al., Biopython: freely available Python tools for computational molecular biology and bioinformatics. Bioinformatics 25, 1422-1423 (2009).
[0652] 36. J. D. Hunter, Matplotlib: A 2D Graphics Environment. Computing in Science & Engineering 9, 90-95 (2007).
[0653] 37. T. S. Elliott et al., Proteome labeling and protein identification in specific tissues and at specific developmental stages in an animal. Nature Biotechnology 32, 465-472 (2014).
[0654] 38. C. Fan, H. Xiong, N. M. Reynolds, D. Soll, Rationally evolving tRNAPyl for efficient incorporation of noncanonical amino acids. Nucleic Acids Research 43, e156-e156 (2015).
[0655] 39. J. N. Beyer et al., Overcoming Near-Cognate Suppression in a Release Factor 1-Deficient Host with an Improved Nitro-Tyrosine tRNA Synthetase. Journal of Molecular Biology 432, 4690-4704 (2020).
[0656] 40. K. C. Schultz et al., A Genetically Encoded Infrared Probe. Journal of the American Chemical Society 128, 13984-13985 (2006).
[0657] 41. A. Telenti et al., The Mycobacterium xenopi GyrA protein splicing element: characterization of a minimal intein. Journal of Bacteriology 179, 6378 (1997).

[0658] Data File S1, Data File S2, and Data File S3 as referred to herein are found in the publication: Wesley E. Robertson, Louise F. H. Funke, Daniel de la Torre, Julius Fredens, Thomas S. Elliott, Martin Spinck, Yonka Christova, Daniele Cervettini, Franz L. Boge, Kim C. Liu, Salvador Buse, Sarah Maslen, George P. C. Salmond, & Jason W. Chin, Sense Codon Reassignment Enables Viral Resistance and Encoded Polymer Synthesis, Science, and are incorporated by reference in their entirety.

1. A prokaryotic cell, wherein the prokaryotic cell:
(a) does not express first and second endogenous tRNAs and does not express a first endogenous release factor;
(b) comprises a genome wherein a first type and a second type of sense codon have been recoded such that the first and second endogenous tRNAs are dispensable, and a first stop codon has been recoded such that the first release factor is dispensable;
(c) expresses first, second, and third orthogonal aminoacyl-tRNA synthetases and first, second, and third orthogonal tRNAs, such that the first orthogonal aminoacyl-tRNA synthetase and the first orthogonal tRNA form a first orthogonal aminoacyl-tRNA synthetase-tRNA pair, and the first orthogonal tRNA is capable of decoding the first type of sense codon, the second orthogonal aminoacyl-tRNA synthetase and the second orthogonal tRNA form a second orthogonal aminoacyl-tRNA synthetase-tRNA pair, and the second orthogonal tRNA is capable of decoding a second type of sense codon, and the third orthogonal aminoacyl-tRNA synthetase and the third orthogonal tRNA form a third orthogonal aminoacyl-tRNA synthetase-tRNA pair, and the third orthogonal tRNA is capable of decoding the first type of stop codon; and
(d) expresses a polypeptide encoded by a nucleic acid, wherein the polypeptide comprises first, second, and third non-canonical amino acids encoded by the first and second sense codons and first stop codon.

2. The prokaryotic cell of claim 1, wherein:
the essential genes of the prokaryotic cell genome do not contain occurrences of the first type of sense codon, and
the first endogenous tRNA is a cognate tRNA for the first type of sense codon.

3. The prokaryotic cell of claim 1, wherein:
the prokaryotic cell genome comprises 5, 4, 3, 2, 1, or no occurrences of the first type of sense codon, and
the first endogenous tRNA is a cognate tRNA for the first type of sense codon.

4. The prokaryotic cell of claim 1, wherein
the first type of sense codon is TCA and the first endogenous tRNA is tRNA^{Ser}_{UGA}; or
the first type of sense codon is TCG and the first endogenous is tRNA^{Ser}_{CGA}.

5. The prokaryotic cell of claim 4, wherein
a plurality of occurrences of the TCA codon have been replaced with AGT; and/or
a plurality of occurrences of the TCG codon have been replaced with AGC.

6. The prokaryotic cell of claim 1, wherein:
the essential genes of the prokaryotic cell genome do not contain occurrences of the second type of sense codon, and
the second endogenous tRNA is a cognate tRNA for the second type of sense codon.

7. The prokaryotic cell of claim 6, wherein:
the essential genes of the prokaryotic cell genome do not contain occurrences of the second type of sense codon, and
the second endogenous tRNA is a cognate tRNA for the second type of sense codon.

8. The prokaryotic cell of claim 6, wherein:
the prokaryotic cell genome comprises 5, 4, 3, 2, 1, or no occurrences of the second type of sense codon, and
the second endogenous tRNA is a cognate tRNA for the second type of sense codon.

9. The prokaryotic cell of claim 6, wherein
the second type of sense codon is TCA and the second endogenous tRNA is tRNA^{Ser}_{UGA}; or
the second type of sense codon is TCG and the second endogenous is tRNA^{Ser}_{CGA}.

10. The prokaryotic cell of claim 1, wherein
the essential genes of the prokaryotic cell genome do not contain occurrences of the first type of stop codon, and
the first endogenous release factor is a cognate release factor for the first type of stop codon.

11. The prokaryotic cell of claim 10, wherein
the genome comprises 5, 4, 3, 2, 1, or no occurrences of the first type of stop codon, and
the first endogenous release factor is a cognate release factor for the first type of stop codon.

12. The prokaryotic cell of claim 10, wherein the first type of stop codon is TAG and wherein the first endogenous release factor is RF-1.

13. The prokaryotic cell of claim 12, wherein occurrences of the TAG codon have been replaced with TAA.

14. The prokaryotic cell of claim 1, wherein the prokaryotic cell is a bacterial cell.

15. The prokaryotic cell of claim 14, wherein the bacterial cell is an Escherichia coli cell.

16. The prokaryotic cell of claim 1, wherein the prokaryotic cell is viable.

The application's sequence listing, which the Patent Office published only in electronic form, follows.

SEQUENCE LISTING (80 sequences)

SEQ ID NO: 1 - protein, 25 aa, synthetic construct
  VARIANT 14: note = SITE - Xaa can be any amino acid
  source 1..25: note = Experimental construct based on ELP
VPGVGVPGVGVPGXGVPGVGVPGVG

SEQ ID NO: 2 - DNA, 4582 bp, synthetic construct
  source 1..4582: mol_type = other DNA; note = Experimental plasmid encoding ELP 9x(TCG)
gagagaagattttcagcctgatacagattaaatcagaacgcagaagcggtctgataaaacagaatttgcctggcggcagtagcgcggtggtcccacctgaccccatgccgaactcagaagtgaaacgccgtagcgccgatggtagtgtggggtctccccatgcgagagtagggaactgccaggcatcaaataaaacgaaaggctcagtcgaaagactgggcctttcgttttatctgttgtttgtcggtgaacgctctcctgagtaggacaaatccgccgggagctgtccctcctgttcagctactgacggggtggtgcgtaacggcaaaagcaccgccggacatcagcgctagcggagtgtatactggcttactatgttggcactgatgagggtgtcagtgaagtgcttcatgtggcaggagaaaaaaggctgcaccggtgcgtcagcagaatatgtgatacaggatatattccgcttcctcgctcactgactcgctacgctcggtcgttcgactgcggcgagcggaaatggcttacgaacggggcggagatttcctggaagatgccaggaagatacttaacagggaagtgagagggccgcggcaaagccgtttttccataggctccgcccccctgacaagcatcacgaaatctgacgctcaaatcagtggtggcgaaacccgacaggactataaagataccaggcgtttccccctggcggctccctcgtgcgctctcctgttcctgcctttcggtttaccggtgtcattccgctgttatggccgcgtttgtctcattccacgcctgacactcagttccgggtaggcagttcgctccaagctggactgtatgcacgaaccccccgttcagtccgaccgctgcgccttatccggtaactatcgtcttgagtccaacccggaaagacatgcaaaagcaccactggcagcagccactggtaattgatttagaggagttagtcttgaagtcatgcgccggttaaggctaaactgaaaggacaagttttggtgactgcgctcctccaagccagttacctcggttcaaagagttggtagctcagagaaccttcgaaaaaccgccctgcaaggcggttttttcgttttcagagcaagagattacgcgcagaccaaaacgatctcaagaagatcatcttattaatcagataaaatatttctagatttcagtgcaatttatctcttcaaatgtagcacctgaagtcagccccatacgatataagttgtaattctcatgtttgacagcttatcatcgataagctttaatgcggtagtttatcacagttaaattgctaacgcagtcaggcaccgtgttttgtttatttttctaaatacattcaaatatgtatccgctcatgagacaataaccctgataaatgcttcaataatattgaaaaaggaagagtatgagtagtgcggtggagtgcaatgtcgtgcaatacgaatggcgaaaagccgagctcatcggtcagcttctcaaccttggggttacccccggcggtgtgctgctggtccacagctccttccgtagcgtccggcccctcgaagatgggccacttggactgatcgaggccctgcgtgctgcgctgggtccgggagggacgctcgtcatgcccagctggagtggtctggacgacgagccgttcgatcctgccacgagccccgttacaccggaccttggagttgtctctgacacattctggcgcctgccaaatgtaaagcgcagcgcccatccatttgcctttgcggcagcggggccacaggcagagcagatcatctctgatccattgcccctgccacctcacagccctgcaagcccggtcgcccgtgtccatgaactcgatgggcaggtacttctcctcggcgtgggacacgatgccaacacgacgctgcatcttgccgagttgatggcaaaggttccctatggggtgccgagacactgcaccattcttcaggatggcaagttggtacgcgtcgattatctcgagaatgaccactgctgtgagcgctttgccttggcggacaggtggctcaaggagaagagccttcagaaggaaggtccagtcggtcatgcctttgctcggttgatccgctcccgcgacattgtggcgacagccctgggtcaactgggccgagatccgttgatcttcctgcatccgccagaggcgggatgcgaagaatgcgatgccgctcgccagagcattggctgaatggaagccggcggcacctcgctaacggattcaccactccaagaattggagccaatcaattcttgcggagaactgtgaatgcgcaaaccaacccttggcagaacatatccatcgcgtgcggccgcgtctccgggagctgcatgtgtcagaggttttcaccgtcatcaccgaaacgcgcgaggcagcagatcaattcgcgcgcgaaggcgaagcggcatgcataatgtgcctgtcaaatggacgaagcagggattctgcaaaccctatgctactccgtcaagccgtcaattgtctgattcgttaccaattatgacaacttgacggctacatcattcactttttcttcacaaccggcacggaactcgctcgggctggccccggtgcattttttaaatacccggctgaaatagagttgatcgtcaaaaccaacattgcgaccgacggtggcgataggcatccgggtggtgctcaaaagcagcttcgcctggctgatacgttggtcctcgcgccagcttaagacgctaatccctaactgctggcggaaaagatgactcagacggctcgggctcaagcaaacatgctgtgcgacgctggcgatatcaaaattgctgtctgccaggtgatcgctgatgtactgacaagcctcgcgtacccgattatccatcggtggatggaggctctcgttaatcgcttccatgcgccgcagtaacaattgctcaagcagatttatcgccagcagctcgctatagcgcccttccccttgcccggcgttaatgatttgcccaaacaggtcgctgaaatgcggctggtgcgcttcatccgggcgaaagaaccccgtattggcaaatatactcggccagttaagccattcatgccagtaggcgcgcggacgaaagtaaacccactggtgataccattcgcgagcctccggatgacgaccgtagtgatgaatctctcctggcgggaacagcaaaatatcacccggtcggcaaacaaattctcgtccctgatttttcaccaccccctgaccgcgaatggtgagattgagaatataacctttcattcccagcggtcggtcgataaaaaaatcgagataaccgttggcctcaatcggcgttaaacccgccaccagatgggcattaaagctgtatcccggcagcaggggatcattttgcgcttcagccatacttttcatactcccgccattcagagaagaaaccaattgtccatattgcatcagacattgccgtcactgcgtcttttactggctcttctcgctaaccaaaccggtaaccccgcttattaaaagcattctgtaacaaagcgggaccaaagccatgacaaaaacgcgtaacaaaagtgtctataatcacggcagaaaagtccacattgattatttgcacggcgtcacactttgctatgccatagcatttttatccataagattagcggatcctacctgacgctttttatcgcaactctctactgtttctccatacccgttttttgggctaacaggaggaattaaccatggttccaggtgttggcgtaccgggtgtaggcgttccgggttcgggtgttccaggcgtaggtgtaccgggtgtaggtgttccaggtgttggcgtaccgggtgtaggcgttccgggttcgggtgttccaggcgtaggtgtaccgggtgtaggtgttccaggtgttggcgtaccgggtgtaggcgttccgggttcgggtgttccaggcgtaggtgtaccgggtgtaggtgttccaggtgttggcgtaccgggtgtaggcgttccgggttcgggtgttccaggcgtaggtgtaccgggtgtaggtgttccaggtgttggcgtaccgggtgtaggcgttccgggttcgggtgttccaggcgtaggtgtaccgggtgtaggtgttccaggtgttggcgtaccgggtgtaggcgttccgggttcgggtgttccaggcgtaggtgtaccgggtgtaggtgttccaggtgttggcgtaccgggtgtaggcgttccgggttcgggtgttccaggcgtaggtgtaccgggtgtaggtgttccaggtgttggcgtaccgggtgtaggcgttccgggttcgggtgttccaggcgtaggtgtaccgggtgtaggtgttccaggtgttggcgtaccgggtgtaggcgttccgggttcgggtgttccaggcgtaggtgtaccgggtgtaggtgttccagggcttcgagcgaagcttgggcccgaacaaaaactcatcagtgaagaggatctgaatagcgccgtcgaccatcatcatcatcatcattgagtttaaacggtctccagcttggctgttttggcggat

SEQ ID NO: 3 - DNA, 3979104 bp, synthetic construct (residues 1-1,989,552 of 3,979,104)
  source 1..3979104: mol_type = other DNA; note = Synthetic E.coli genome
agcttttcattctgactgcaacgggcaatatgtctctgtgtggattaaaaaaagagtgtctgatagcagcttctgaactggttacctgccgtgagtaaattaaaattttattgacttaggtcactaaatactttaaccaatataggcatagcgcacagacagataaaaattacagagtacacaacatccatgaaacgcattagcaccaccattaccaccaccatcaccattaccacaggtaacggtgcgggctgacgcgtacaggaaacacagaaaaaagcccgcacctgacagtgcgggctttttttttcgaccaaaggtaacgaggtaacaaccatgcgagtgttgaagttcggcggtacaagtgtggcaaatgcagaacgttttctgcgtgttgccgatattctggaaagcaatgccaggcaggggcaggtggccaccgtcctctctgcccccgccaaaatcaccaaccacctggtggcgatgattgaaaaaaccattagcggccaggatgctttacccaatatcagcgatgccgaacgtatttttgccgaacttttgacgggactcgccgccgcccagccggggttcccgctggcgcaattgaaaactttcgtcgatcaggaatttgcccaaataaaacatgtcctgcatggcattagtttgttggggcagtgcccggatagcatcaacgctgcgctgatttgccgtggcgagaaaatgagcatcgccattatggccggcgtattagaagcgcgcggtcacaacgttactgttatcgatccggtcgaaaaactgctggcagtggggcattacctcgaatctaccgtcgatattgctgagtccacccgccgtattgcggcaagccgcattccggctgatcacatggtgctgatggcaggtttcaccgccggtaatgaaaaaggcgaactggtggtgcttggacgcaacggttccgactactctgctgcggtgctggctgcctgtttacgcgccgattgttgcgagatttggacggacgttgacggggtctatacctgcgacccgcgtcaggtgcccgatgcgaggttgttgaagagcatgtcctaccaggaagcgatggagctttcctacttcggcgctaaagttcttcacccccgcaccattacccccatcgcccagttccagatcccttgcctgattaaaaataccggaaatcctcaagcaccaggtacgctcattggtgccagccgtgatgaagacgaattaccggtcaagggcatttccaatctgaataacatggcaatgttcagcgtttctggtccggggatgaaagggatggtcggcatggcggcgcgcgtctttgcagcgatgagtcgcgcccgtatttccgtggtgctgattacgcaaagttcttccgaatacagcatcagtttctgcgttccacaaagcgactgtgtgcgagctgaacgggcaatgcaggaagagttctacctggaactgaaagaaggcttactggagccgctggcagtgacggaacggctggccattatcagcgtggtaggtgatggtatgcgcaccttgcgtgggatcagcgcgaaattctttgccgcactggcccgcgccaatatcaacattgtcgccattgctcagggatcttctgaacgcagtatctctgtcgtggtaaataacgatgatgcgaccactggcgtgcgcgttactcatcagatgctgttcaataccgatcaggttatcgaagtgtttgtgattggcgtcggtggcgttggcggtgcgctgctggagcaactgaagcgtcagcaaagctggctgaagaataaacatatcgacttacgtgtctgcggtgttgccaacagcaaggctctgctcaccaatgtacatggccttaatctggaaaactggcaggaagaactggcgcaagccaaagagccgtttaatctcgggcgcttaattcgcctcgtgaaagaatatcatctgctgaacccggtcattgttgactgcacttccagccaggcagtggcggatcaatatgccgacttcctgcgcgaaggtttccacgttgtcacgccgaacaaaaaggccaacaccagcagcatggattactaccatcagttgcgttatgcggcggaaaaaagccggcgtaaattcctctatgacaccaacgttggggctggattaccggttattgagaacctgcaaaatctgctcaatgcaggtgatgaattgatgaagttctccggcattctttctggtagcctttcttatatcttcggcaagttagacgaaggcatgagtttctccgaggcgaccacgctggcgcgggaaatgggttataccgaaccggacccgcgagatgatctttctggtatggatgtggcgcgtaaactattgattctcgctcgtgaaacgggacgtgaactggagctggcggatattgaaattgaacctgtgctgcccgcagagtttaacgccgagggtgatgttgccgcttttatggcgaatctgagtcaactcgacgatctctttgccgcgcgcgtggcgaaggcccgtgatgaaggaaaagttttgcgctatgttggcaatattgatgaagatggcgtctgccgcgtgaagattgccgaagtggatggtaatgatccgctgttcaaagtgaaaaatggcgaaaacgccctggccttctatagccactattatcagccgctgccgttggtactgcgcggatatggtgcgggcaatgacgttacagctgccggtgtctttgctgatctgctacgtaccctcagttggaagttaggagtctgacatggttaaagtttatgccccggcttccagtgccaatatgagcgtcgggtttgatgtgctcggggcggcggtgacacctgttgatggtgcattgctcggagatgtagtcacggttgaggcggcagagacattcagtctcaacaacctcggacgctttgccgataagctgccgagtgaaccacgggaaaatatcgtttatcagtgctgggagcgtttttgccaggaactgggtaagcaaattccagtggcgatgaccctggaaaagaatatgccgatcggtagcggcttaggctccagtgcctgtagcgtggtcgcggcgctgatggcgatgaatgaacactgcggcaagccgcttaatgacactcgtttgctggctttgatgggcgagctggaaggccgtatctccggcagcattcattacgacaacgtggcaccgtgttttctcggtggtatgcagttgatgatcgaagaaaacgacatcatcagccagcaagtgccagggtttgatgagtggctgtgggtgctggcgtatccggggattaaagtcagcacggcagaagccagggctattttaccggcgcagtatcgccgccaggattgcattgcgcacgggcgacatctggcaggcttcattcacgcctgctattcccgtcagcctgagcttgccgcgaagctgatgaaagatgttatcgctgaaccctaccgtgaacggttactgccaggcttccggcaggcgcggcaggcggtcgcggaaatcggcgcggtagcgagcggtatctccggctccggcccgaccttgttcgctctgtgtgacaagccggaaaccgcccagcgcgttgccgactggttgggtaagaactacctgcaaaatcaggaaggttttgttcatatttgccggctggatacggcgggcgcacgagtactggaaaactaaatgaaactctacaatctgaaagatcacaacgagcaggtcagctttgcgcaagccgtaacccaggggttgggcaaaaatcaggggctgttttttccgcacgacctgccggaattcagcctgactgaaattgatgagatgctgaagctggattttgtcacccgcagtgcgaagatcctcagcgcgtttattggtgatgaaatcccacaggaaatcctggaagagcgcgtgcgcgcggcgtttgccttcccggctccggtcgccaatgttgaaagcgatgtcggttgtctggaattgttccacgggccaacgctggcatttaaagatttcggcggtcgctttatggcacaaatgctgacccatattgcgggtgataagccagtgaccattctgaccgcgacctccggtgataccggagcggcagtggctcatgctttctacggtttaccgaatgtgaaagtggttatcctctatccacgaggcaaaatcagtccactgcaagaaaaactgttctgtacattgggcggcaatatcgaaactgttgccatcgacggcgatttcgatgcctgtcaggcgctggtgaagcaggcgtttgatgatgaagaactgaaagtggcgctagggttaaacagcgctaacagcattaacatcagccgtttgctggcgcagatttgctactactttgaagctgttgcgcagctgccgcaggagacgcgcaaccagctggttgtcagcgtgccaagcggaaacttcggcgatttgacggcgggtctgctggcgaagagtctcggtctgccggtgaaacgttttattgctgcgaccaacgtgaacgataccgtgccacgtttcctgcacgacggtcagtggagtcccaaagcgactcaggcgacgttatccaacgcgatggacgtgagtcagccgaacaactggccgcgtgtggaagagttgttccgccgcaaaatctggcaactgaaagagctgggttatgcagccgtggatgatgaaaccacgcaacagacaatgcgtgagttaaaagaactgggctacactagcgagccgcacgctgccgtagcttatcgtgcgctgcgtgatcagttgaatccaggcgaatatggcttgttcctcggcaccgcgcatccggcgaaatttaaagagagcgtggaagcgattctcggtgaaacgttggatctgccaaaagagctggcagaacgtgctgatttacccttgcttagtcataatctgcccgccgattttgctgcgttgcgtaaattgatgatgaatcatcagtaaaatctattcattatctcaatcaggccgggtttgcttttatgcagcccggcttttttatgaagaaattatggagaaaaatgacagggaaaaaggagaaattctcaataaatgcggtaacttagagattaggattgcggagaataacaaccgccgttctcatcgagtaatctccggatatcgacccataacgggcaatgataaaaggagtaacctgtgaaaaagatgcaatctatcgtactcgcactttccctggttctggtcgctcccatggcagcacaggctgcggaaattacgttagtcccgagtgtaaaattacagataggcgatcgtgataatcgtggctattactgggatggaggtcactggcgcgaccacggctggtggaaacaacattatgaatggcgaggcaatcgctggcacctacacggaccgccgccaccgccgcgccaccataagaaagctcctcatgatcatcacggcggtcatggtccaggcaaacatcaccgctaaatgacaaatgccgggtaacaatccggcattcagcgcctgatgcgacgctggcgcgtcttatcaggcctacgttaattctgcaatatattgaatctgcatgcttttgtaggcaggataaggcgttcacgccgcatccggcattgactgcaaacttaacgctgctcgtagcgtttaaacaccagttcgccattgctggaggaatcttcatcaaagaagtaaccttcgctattaaaaccagtcagttgctctggtttggtcagccgattttcaataatgaaacgactcatcagaccgcgtgctttcttagcgtagaagctgatgatcttaaatttgccgttcttctcatcgaggaacaccggcttgataatctcggcattcaatttcttcggcttcacgcttttaaaatactcatcactcgccagattaatcaccacattatcgccttgtgctgcgagcgcctcgttcagcttgttggtgatgatatctccccagaattgatacagatctttccctcgggcattctcaagacggatccccatttccagacgataaggctgcattaaatcgagcgggcggagtacgccatacaagccggaaagcattcgcaaatgctgttgggcaaaatcgaaatcgtcttcgctgaaggtttcggcctgcaagccggtgtagacatcacctttaaacgccagaatcgcctggcgggcattcgccggcgtgaaatctggctgccagtcatgaaagcgagcggcgttgatacccgccagtttgtcgctgatgcgcatcagcgtgctaatctgcggaggcgtcagtttccgcgcctcatggatcaactgctgggaattgtctaacagctccggcagcgtatagcgcgtggtggtcaacgggctttggtaatcaagcgttttcgcaggactaataagaatcagcatatccagtccttgcaggaaatttatgccgactttagcaaaaaatgagaatgagttgatcgatagttgtgattactcctggctaacatcatcccacgcgtccggagaaagctggcgaccgatatccggataacgcaatggatcaaacaccgggcgcacgccgagtttacgctggcgtagataatcactggcaatggtatgaaccacagggctgagcagtaaaatggcggtcaaattggtaatagccatgcaggccattatgatatctgccagttgccacatcagcggaaggcttagcaaggtgccgccgatgaccgttgcgaaggtgcagatccgcaaacaccagatcgctttagggttgttcaggcgtaaaaagaagagattgttttcggcataaatgtagttggcaacgatggagctgaaggcaaacagaataaccacaagggtaacaaactcagcaccccaggaacccattagcacccgcatcgccttctggataagctgaataccttccagcggcatgtaggttgtgccgttacccgccagtaatatcagcatggcgcttgccgtacagatgaccagggtgtcgataaaaatgccaatcatctggacaatcccttgcgctgccggatgcggaggccaggacgccgctgccgctgccgcgtttggcgtgctacccattcccgcctcattggaaaacatactgcgctgaaaaccgttagtaatcgcctggcttaaggtatatcccgccgcgccgcctgccgcttcctgccagccaaaagcactctcaaaaatagaccaaatgacgtggggaagttgcccgatattcattacgcaaattaccaggctggtcagtacccagattatcgccatcaacgggacaaagccctgcatgagccgggcgacgccatgaagaccgcgagtgattgccagcagagtaaagacagcgagaataatgcctgtcaccagcgggggaaaatcaaaagaaaaactcagggcgcgggcaacggcgttcgcttgaactccgctgaaaattatgccataggcgatgagcaaaaagacggcgaacagaacgcccatccagcgcatccccagcccgcgcgccatataccatgccggtccgccacgaaactgcccattgacgtcacgttctttataaagttgtgccagagaacattcggcaaagctggtcgccatgccgataaacgcggcaacccacatccaaaagacggctccaggtccaccggcggtaatagccagcgcaacgccggccaggttgccgctacccacgcgcgccgcaagactggtacacaaactctgaaaactggttaaaccgcctggctgtggatgaatgctatttttaagacttttgccaaactggcggatgtagcgaaactgcacaaatccggtgcgaaaagtgaaccaacaacctgcgccgaagagcaggtaaatcattacgcttccccaaaggacgctgttaatgaaggagaaaaaatctggcatgcatatccctcttattgccggccgcgatgactttcctgtgtaaacgttaccaattgtttaagaagtatatacgctacgaggtacttgataacttctgcgtagcatacatgaggttttgtataaaaatggcgggcgatatcaacgcagtgtcagaaatccgaaacagtctcgcctggcgataaccgtcttgtcggcggttgcgctgacgttgcgtcgtgatatcatcagggcagaccggttacatccccctaacaagctgtttaaagagaaatactatcatgacggacaaattgacctcccttcgtcagtacaccaccgtagtggccgacactggggacatcgcggcaatgaagctgtatcaaccgcaggatgccacaaccaacccttctctcattcttaacgcagcgcagattccggaataccgtaagttgattgatgatgctgtcgcctgggcgaaacagcagagcaacgatcgcgcgcagcagatcgtggacgcgaccgacaaactggcagtaaatattggtctggaaatcctgaaactggttccgggccgtatcagtactgaagttgatgcgcgtctttcctatgacaccgaagcgagtattgcgaaagcaaaacgcctgatcaaactctacaacgatgctggtattagcaacgatcgtattctgatcaaactggcttctacctggcagggtatccgtgctgcagaacagctggaaaaagaaggcatcaactgtaacctgaccctgctgttctccttcgctcaggctcgtgcttgtgcggaagcgggcgtgttcctgatcagcccgtttgttggccgtattcttgactggtacaaagcgaataccgataagaaagagtacgctccggcagaagatccgggcgtggtttctgtatctgaaatctaccagtactacaaagagcacggttatgaaaccgtggttatgggcgcaagcttccgtaacatcggcgaaattctggaactggcaggctgcgaccgtctgaccatcgcaccggcactgctgaaagagctggcggagagcgaaggggctatcgaacgtaaactgtcttacaccggcgaagtgaaagcgcgtccggcgcgtatcactgagtccgagttcctgtggcagcacaaccaggatccaatggcagtagataaactggcggaaggtatccgtaagtttgctattgaccaggaaaaactggaaaaaatgatcggcgatctgctgtaatcattcttagcgtgaccgggaagtcggtcacgctacctcttctgaagcctgtctgtcactcccttcgcagtgtatcattctgtttaacgagactgtttaaacggaaaaatcttgatgaatactttacgtattggcttagtttccatctctgatcgcgcatccagcggcgtttatcaggataaaggcatccctgcgctggaagaatggctgacaagcgcgctaaccacgccgtttgaactggaaacccgcttaatccccgatgagcaggcgatcatcgagcaaacgttgtgtgagctggtggatgaaatgagttgccatctggtgctcaccacgggcggaactggcccggcgcgtcgtgacgtaacgcccgatgcgacgctggcagtagcggaccgcgagatgcctggctttggtgaacagatgcgccagatcagcctgcattttgtaccaactgcgatccttagccgtcaggtgggcgtgattcgcaaacaggcgctgatccttaacttacccggtcagccgaagtctattaaagagacgctggaaggtgtgaaggacgctgagggtaacgttgtggtacacggtatttttgccagcgtaccgtactgcattcagttgctggaagggccatacgttgaaacggcaccggaagtggttgcagcattcagaccgaagagtgcaagacgcgacgttagcgaataaaaaaatccccccgagcggggggatctcaaaacaattagtgggattcaccaatcggcagaacggtgcgaccaaactgctcgttcagtacttcacccatcgccagatagattgcgctggcaccgcagatcagcccaatccagccggcaaagtggatgattgcggcgttaccggcaatgttaccgatcgccagcagggcaaacagcacggtcaggctaaagaaaacgaattgcagaacgcgtgcgcctttcagcgtgccgaagaacataaacagcgtaaatacgccccacagacccaggtagacaccaaggaactgtgcatttggcgcatcggtcagacccagtttcggcatcagcagaatcgcaaccagcgtcagccagaaagaaccgtaagaggtgaatgcggttaaaccgaaagtgttgccttttttgtactccagcagaccagcaaaaatttgcgcgatgccgccgtagaaaatgcccatggcaagaataataccgtccagagcgaaataacccacgttgtgcaggttaagcagaatggtggtcatgccgaagcccatcaggcccagcggtgccggattagccaacttagtgttgcccataattcctcaaaaatcatcatcgaatgaatggtgaaataatttccctgaataactgtagtgttttcagggcgcggcataataatcagccagtggggcagtgtctacgatcttttgaggggaaaatgaaaattttccccggtttccggtatcagacctgagtggcgctaaccatccggcgcaggcaggcgatttgcagtacggctggaatcgtcacgcgataggcgctgccgctgaccgctttaaccccatttagtgccgcacctacagggcctcccagccccgcgccgcgcagcaaaccatgcccaagtacgctcattgctgcgtgggtgcgtaaaatgcgggtcagttggctggaaagcaaatggctcacaccttttgccaataatttgtctttcatcagcagcggcagcagctcttccagctcattcaccctggcatcgaccgcgtgcagaaactcctgcttatgttcctcgtccattttcttccaggtattacgcagaaattgttccagtaactgttgctcaatttcaaacgtagacatctctttgtcggctttcagcttcaatcgcttactaacatcgagcaaaatggcccgatacaatttaccgtgtccgcgcagtttgttggcgatactatcgccaccaaaatgctgtaattctccggcaatcagctgccagttgcggcgatgttgctcgggatgcccttccatgcttttaaacagttcgttgcgcatcagtacgctggagaggcgagttttgcctttttcattatgggtgagcaatcgggcgaaatttgccaactgttcctcactacaatgctgaagaaaatccagatcactatcattcaggtaattaacattcattttttgtggcttctatattctggcgttagtcgtcgccgataattttcagcgtggccatatcgctactgttcaccgtatgaccgctaaaggtgattttactgacgcagcgtttattgtcgttatcgctgttaatgttgatccagtcagtggtttgcccttcttttatttcactaggaatattcaggctctgactggcgctacgggcggctttgaaataaacgcttgcaccgcttaactgtaaatcgccatggtcggcagagagttgtatgcgtttcacaatgcgacaaacaggaagtttcagcgccagatcgttggtttcgttacgcggcattgcaatggcgccgaggagtttatggtcgtttgcctgcgccgtgcagcacagcatcaggctaatcgccaggctggcggaaatcgtaaaaacggatttcataaggattctcttagtgggaagaggtagggggatgaatacccactagtttactgctgataaagagaagattcaggcacgtaatcttttctttttattacaattttttgatgaatgccttggctgcgattcattctttatatgaataaaattgctgtcaattttacgtcttgtcctgccatatcgcgaaatttctgcgcaaaagcacaaaaaatttttgcatctcccccttgatgacgtggtttacgaccccatttagtagtcaaccgcagtgagtgagtctgcaaaaaaatgaaattgggcagttgaaaccagacgtttcgcccctattacagactcacaaccacatgatgaccgaatatatagtggagacgtttagatgggtaaaataattggtatcgacctgggtactaccaactcttgtgtagcgattatggatggcaccactcctcgcgtgctggagaacgccgaaggcgatcgcaccacgccttctatcattgcctatacccaggatggtgaaactctagttggtcagccggctaaacgtcaggcagtgacgaacccgcaaaacactctgtttgcgattaaacgcctgattggtcgccgcttccaggacgaagaagtacagcgtgatgtttccatcatgccgttcaaaattattgctgctgataacggcgacgcatgggtcgaagttaaaggccagaaaatggcaccgccgcagatttctgctgaagtgctgaaaaaaatgaagaaaaccgctgaagattacctgggtgaaccggtaactgaagctgttatcaccgtaccggcatactttaacgatgctcagcgtcaggcaaccaaagacgcaggccgtatcgctggtctggaagtaaaacgtatcatcaacgaaccgaccgcagctgcgctggcttacggtctggacaaaggcactggcaaccgtactatcgcggtttatgacctgggtggtggtactttcgatatttctattatcgaaatcgacgaagttgacggcgaaaaaaccttcgaagttctggcaaccaacggtgatacccacctggggggtgaagacttcgacagccgtctgatcaactatctggttgaagaattcaagaaagatcagggcattgacctgcgcaacgatccgctggcaatgcagcgcctgaaagaagcggcagaaaaagcgaaaatcgaactgtcttccgctcagcagaccgacgttaacctgccatacatcactgcagacgcgaccggtccgaaacacatgaacatcaaagtgactcgtgcgaaactggaaagcctggttgaagatctggtaaaccgttccattgagccgctgaaagttgcactgcaggacgctggcctgtccgtatctgatatcgacgacgttatcctcgttggtggtcagactcgtatgccaatggttcagaagaaagttgctgagttctttggtaaagagccgcgtaaagacgttaacccggacgaagctgtagcaatcggtgctgctgttcagggtggtgttctgactggtgacgtaaaagacgtactgctgctggacgttaccccgctgtctctgggtatcgaaaccatgggcggtgtgatgacgacgctgatcgcgaaaaacaccactatcccgaccaagcacagccaggtgttctctaccgctgaagacaaccagtctgcggtaaccatccatgtgctgcagggtgaacgtaaacgtgcggctgataacaaatctctgggtcagttcaacctagatggtatcaacccggcaccgcgcggcatgccgcagatcgaagttaccttcgatatcgatgctgacggtatcctgcacgtttccgcgaaagataaaaacagcggtaaagagcagaagatcaccatcaaggcttcttctggtctgaacgaagatgaaatccagaaaatggtacgcgacgcagaagctaacgccgaagctgaccgtaagtttgaagagctggtacagactcgcaaccagggcgaccatctgctgcacagcacccgtaagcaggttgaagaagcaggcgacaaactgccggctgacgacaaaactgctatcgagtctgcgctgactgcactggaaactgctctgaaaggtgaagacaaagccgctatcgaagcgaaaatgcaggaactggcacaggtttcccagaaactgatggaaatcgcccagcagcaacatgcccagcagcagactgccggtgctgatgcttctgcaaacaacgcgaaagatgacgatgttgtcgacgctgaatttgaagaagtcaaagacaaaaaataatcgccctataaacgggtaattatactgacacgggcgaaggggaatttcctctccgcccgtgcattcatctaggggcaatttaaaaaagatggctaagcaagattattacgagattttaggcgtttccaaaacagcggaagagcgtgaaatcagaaaggcctacaaacgcctggccatgaaataccacccggaccgtaaccagggtgacaaagaggccgaggcgaaatttaaagagatcaaggaagcttatgaagttctgaccgacagccaaaaacgtgcggcatacgatcagtatggtcatgctgcgtttgagcaaggtggcatgggcggcggcggttttggcggcggcgcagacttcagcgatatttttggtgacgttttcggcgatatttttggcggcggacgtggtcgtcaacgtgcggcgcgcggtgctgatttacgctataacatggagctcaccctcgaagaagctgtacgtggcgtgaccaaagagatccgcattccgactctggaagagtgtgacgtttgccacggtagcggtgcaaaaccaggtacacagccgcagacttgtccgacctgtcatggttctggtcaggtgcagatgcgccagggattcttcgctgtacagcagacctgtccacactgtcagggccgcggtacgctgatcaaagatccgtgcaacaaatgtcatggtcatggtcgtgttgagcgcagcaaaacgctgtccgttaaaatcccggcaggggtggacactggagaccgcatccgtcttgcgggcgaaggtgaagcgggcgagcatggcgcaccggcaggcgatctgtacgttcaggttcaggttaaacagcacccgattttcgagcgtgaaggcaacaacctgtattgcgaagtcccgatcaacttcgctatggcggcgctgggtggcgaaatcgaagtaccgacccttgatggtcgcgtcaaactgaaagtgcctggcgaaacccagaccggtaagctattccgtatgcgcggtaaaggcgtcaagtctgtccgcggtggcgcacagggtgatttgctgtgccgcgttgtcgtcgaaacaccggtaggcctgaacgaaaggcagaaacagctgctgcaagagctgcaagaaagcttcggtggcccaaccggcgagcacaacagcccgcgcagtaagagcttctttgatggtgtgaagaagttttttgacgacctgacccgctaacctccccaaaagcctgcccgtgggcaggcctgggtaaaaatagggtgcgttgaagatatgcgagcacctgtaaagtggcggggatcactctacctcaatgtgtatcacaatatccatattctttgtgggggagtctggagattgagtagatattcttgttcagaatgtatcagccgatggttctacgattcttaagccacgaagagttcagatagtacaacggcatgtctcttttgactatctggcaaccggcagtgtgttctctcacgcatcacaaaagcagcaggcataaaaaaacccgcttgcgcgggctttttcacaaagcttcagcaaattggcgattaagccagtttgttgatctgtgcagtcaggttagccttatgacgtgcagctttgtttttgtggatcagacctttagcagcctgacggtccacgatcggttgcatttcgttaaatgctttctgtgcagcagctttgtcgccagcttcgatagctgcgtatactttcttgatgaaagtacgcatcatagagcgacggcttgcgttgtgcttacgagccttttcagactgaatggcgcgcttcttagcacttttgatattagccaaggtccaactcccaaatgtgttctatatggacaattcaaaggccgaggaatatgcccttttagccttcttttgtcaatggatttgtgcaaataagcgccgttaatgtgccggcacagcttacgtagtgatggcgcaggattctaccagcttgcggggtgtgaatacagcttttccgcgataaaaattgcagcaggcggtcagtttcttcccgtgatttgcgccatggcaatgaaaagccacttctttctgattagcgtactcaatcgccggttaaccttgaccgctgtacaaggtatactcggacgatttagcctgttttgagccagacatgaagctgatacgcggcatacataatctcagccaggccccgcaagaagggtgtgtgctgactattggtaatttcgacggcgtgcatcgcggtcatcgcgcgctgttacagggcttgcaggaagaagggcgcaagcgcaacttaccggtgatggtgatgctttttgaacctcaaccactggaactgtttgctaccgataaagccccggcaagactgacccggctgcgggaaaaactgcgttaccttgcagagtgtggcgttgattacgtgctgtgcgtgcgtttcgacaggcgtttcgcggcgttaaccgcgcaaaatttcatcagcgatcttctggtgaagcatttgcgcgtaaaatttcttgccgtaggtgatgatttccgctttggcgctggtcgtgaaggcgatttcttgttattacagaaagctggcatggaatacggcttcgatatcaccagtacgcaaactttttgcgaaggtggcgtgcgcatcagcagcaccgccgtgcgtcaggcccttgcggatgacaatctggctctggcagagagtttactggggcacccgtttgccatctccgggcgtgtagtccacggtgatgaattagggcgcactataggtttcccgacggcgaatgtaccgctgcgccgtcaggtttccccggtgaaaggggtttatgcggtagaagtgctgggcctcggtgaaaagccgttacccggcgtggcaaacatcggaacacgcccaacggttgccggtattcgccagcagctggaagtgcatttgttagatgttgcaatggacctttacggtcgccatatacaagtagtgctgcgtaaaaaaatacgcaatgagcagcgatttgcgagcctggacgaactgaaagcgcagattgcgcgtgatgaattaaccgcccgcgaattttttgggctaacaaaaccggcttaagcctgttatgtaatcaaaccgaaatacggaaccgagaatctgatgagtgactataaaagtaccctgaatttgccggaaacagggttcccgatgcgtggcgatctcgccaagcgcgaacccggaatgctggcgcgttggactgatgatgatctgtacggcatcatccgtgcggctaaaaaaggcaaaaaaaccttcattctgcatgatggccctccttatgcgaatggcagcattcatattggtcacagcgttaacaagattctgaaagacattatcgtgaagtccaaagggctttccggttatgacagcccgtatgtgcctggctgggactgccacggtctgccgatcgagctgaaagtcgagcaagaatacggtaagccgggtgagaaattcaccgccgccgagttccgcgccaagtgccgcgaatacgcggcgacccaggttgacggtcaacgcaaagactttatccgtctgggcgtgctgggcgactggagccacccgtacctgaccatggacttcaaaactgaagccaacatcatccgcgcgctgggcaaaatcatcggcaacggtcacctgcacaaaggcgcgaagccagttcactggtgcgttgactgccgttctgcgctggcggaagcggaagttgagtattacgacaaaacttctccgtccatcgacgttgctttccaggcagtcgatcaggatgcactgaaagcaaaatttgccgtaagcaacgttaacggcccaatcagcctggtaatctggaccaccacgccgtggactctgcctgccaaccgcgcaatctctattgcaccagatttcgactatgcgctggtgcagatcgacggtcaggccgtgattctggcgaaagatctggttgaaagcgtaatgcagcgtatcggcgtgaccgattacaccattctcggcacggtaaaaggtgcggagcttgagctgctgcgctttacccatccgtttatgggcttcgacgttccggcaatcctcggcgatcacgttaccctggatgccggtaccggtgccgttcacaccgcgcctggccacggcccggacgactatgtgatcggtcagaaatacggcctggaaaccgctaacccggttggcccggacggcacttatctgccgggcacttatccgacgctggatggcgtgaacgtcttcaaagcgaacgacatcgtcgttgcgctgctgcaggaaaaaggcgcgctgctgcacgttgagaaaatgcagcacagctatccgtgctgctggcgtcacaaaacgccgatcatcttccgcgcgacgccgcagtggttcgtcagcatggatcagaaaggtctgcgtgcgcagagtctgaaagagatcaaaggcgtgcagtggatcccggactggggccaggcgcgtatcgagagcatggttgctaaccgtcctgactggtgtatctcccgtcagcgcacctggggtgtaccgatgagtctgttcgtgcacaaagacacggaagagctgcatccgcgtacccttgaactgatggaagaagtggcaaaacgcgttgaagtcgatggcatccaggcgtggtgggatctcgatgcgaaagagatcctcggcgacgaagctgatcagtacgtgaaagtgccggacacattggatgtatggtttgactccggatctacccactcttctgttgttgacgtgcgtccggaatttgccggtcacgcagcggacatgtatctggaaggttctgaccaacaccgcggctggttcatgtcttccctaatgatctccaccgcgatgaagggtaaagcgccgtatcgtcaggtactgacccacggctttaccgtggatggtcagggccgcaagatgtctaaatccatcggcaataccgttagcccgcaggatgtgatgaacaaactgggcgcggatattctgcgtctgtgggtggcaagtaccgactacaccggtgaaatggccgtttctgacgagatcctgaaacgtgctgccgatagctatcgtcgtatccgtaacaccgcgcgcttcctgctggcaaacctgaacggttttgatccagcaaaagatatggtgaaaccggaagagatggtggtactggatcgctgggccgtaggttgtgcgaaagcggcacaggaagacatcctcaaggcgtacgaagcatacgatttccacgaagtggtacagcgtctgatgcgcttctgctccgttgagatgggttccttctacctcgacatcatcaaagaccgtcagtacaccgccaaagcggacagtgtggcgcgtcgtagctgccagactgcgctatatcacatcgcagaagcgctggtgcgctggatggcaccaatcctctccttcaccgctgatgaagtgtggggctacctgccgggcgaacgtgaaaaatacgtcttcaccggtgagtggtacgaaggcctgtttggcctggcagacagtgaagcgatgaacgatgcgttctgggacgagctgttgaaagtgcgtggcgaagtgaacaaagtcattgagcaagcgcgtgccgacaagaaagtgggtggcagcctggaagcggcagtaaccttgtatgcagaaccggaactgagcgcgaaactgaccgcgctgggcgatgaattacgatttgtcctgttgacctccggcgctaccgttgcagactataacgacgcacctgctgatgctcagcagagcgaagtactcaaagggctgaaagtcgcgttgagtaaagccgaaggtgagaagtgcccacgctgctggcactacacccaggatgtcggcaaggtggcggaacacgcagaaatctgcggccgctgtgtcagcaacgtcgccggtgacggtgaaaaacgtaagtttgcctgatgagtcaaagcatctgtagtacagggctacgctggctgtggctggtggtagtcgtgctgattatcgatctgggcagcaaatacctgatcctccagaactttgctctgggggatacggtcccgctgttcccgagccttaatctgcattatgcgcgtaactatggcgcggcgtttagtttccttgccgatagcggcggctggcagcgttggttctttgccggtattgcgattggtattagcgtgatcctggcagtgatgatgtatcgcagcaaggccacgcagaagctaaacaatatcgcttacgcgctgattattggcggcgcgctgggcaacctgttcgaccgcctgtggcacggcttcgttgtcgatatgatcgacttctacgtcggcgactggcacttcgccaccttcaaccttgccgatactgccatctgtgtcggtgcggcactgattgtgctggaaggttttttgccttctagagcgaaaaaacaataataaaccctgccggatgcgatgctgacgcatcttatccggcctacagattgctgcgaaatcgtaggccggataaggcgtttacgccgcatccggcaaaaatccttaaatataagagcaaacctgcatgtctgaatctgtacagagcaatagcgccgtcctggtgcacttcacgctaaaactcgacgatggcaccaccgccgagtctacccgcaacaacggtaaaccggcgctgttccgcctgggtgatgcttctctttctgaagggctggagcaacacctgttggggctgaaagtgggcgataaaaccaccttcagcttggagccagatgcggcgtttggcgtgccgagtccggacctgattcagtacttctcccgccgtgaatttatggatgcaggcgagccagaaattggcgcaatcatgctttttaccgcaatggatggcagtgagatgcctggcgtgatccgcgaaattaacggcgactccattaccgttgatttcaaccatccgctggccgggcagaccgttcattttgatattgaagtgctggaaatcgatccggcactggaggcgtaacatgcagatcctgttggccaacccgcgtggtttttgtgccggggtagaccgcgctatcagcattgttgaaaacgcgctggccatttacggcgcaccgatatatgtccgtcacgaagtggtacataaccgctatgtggtcgatagcttgcgtgagcgtggggctatctttattgagcagattagcgaagtaccggacggcgcgatcctgattttctccgcacacggtgtttctcaggcggtacgtaacgaagcaaaaagtcgcgatttgacggtgtttgatgccacctgtccgctggtgaccaaagtgcatatggaagtcgcccgcgccagtcgccgtggcgaagaatctattctcatcggtcacgccgggcacccggaagtggaagggacaatgggccagtacagtaacccggaagggggaatgtatctggtcgaaagcccggacgatgtgtggaaactgacggtcaaaaacgaagagaagctctcctttatgacccagaccacgctgagcgtggatgacacgtctgatgtgatcgacgcgctgcgtaaacgcttcccgaaaattgtcggtccgcgcaaagatgacatctgctacgccacgactaaccgtcaggaagcggtacgcgccctggcagaacaggcggaagttgtgttggtggtcggtagcaaaaactcctccaactccaaccgtctggcggagctggcccagcgtatgggcaaacgcgcgtttttgattgacgatgcgaaagacatccaggaagagtgggtgaaagaggttaaatgcgtcggcgtgactgcgggcgcaagcgctccggatattctggtgcagaatgtggtggcacgtttgcagcagctgggcggtggtgaagccattccgctggaaggccgtgaagaaaacattgttttcgaagtgccgaaagagctgcgtgtcgatattcgtgaagtcgattaagtcattagcagcctaagttatgcgaaaatgccggtcttgttaccggcattttttatggagaaaacatgcgtttacctatcttcctcgatactgaccccggcattgacgatgccgtcgccattgccgccgcgatttttgcacccgaactcgacctgcaactgatgaccaccgtcgcgggtaatgtcagcgttgagaaaactacccgcaatgccctgcaactgctgcatttctggaatgcggagattccgctcgcccaaggggccgctgtgccactggtacgcgcaccgcgtgatgcggcatctgtgcacggcgaaagcggaatggctggctacgactttgttgagcacaaccgaaagccgctcgggataccggcgtttctggcgattcgggatgccctgatgcgtgcaccagagcctgttaccctggtggccatcggcccgttaaccaatattgcgctgttacttagtcaatgcccggaatgcaagccgtatattcgccgtctggtgatcatgggtggttctgccggacgcggcaactgtacgccaaacgccgagtttaatattgctgccgatccagaagctgctgcctgtgtcttccgcagtggtattgaaatcgtcatgtgcggtttggatgtcaccaatcaggcaatattaactcctgactatctctctacactgccgcagttaaaccgtaccgggaaaatgcttcacgccctgtttagccactaccgtagcggcagtatgcaaagcggcttgcgaatgcacgatctctgcgccatcgcctggctggtgcgcccggacctgttcactctcaaaccctgttttgtggcagtggaaactcagggcgaatttaccagtggcacgacggtggttgatatcgacggttgcctgggcaagccagccaatgtacaggtggcattggatctggatgtgaaaggcttccagcagtgggtggctgaggtgctggctctggcgagctaacctgtcacatgttattggcatgcagtcattcatcgactcatgcctttcactgatatccctccctgtttatcattaatttctaattatcagcgtttttggctggcggcgtagcgatgcgctggttactctgaaaacggtctatgcaaattaacaaaagagaatagctatgcatgatgcaaacatccgcgttgccatcgcgggagccggggggcgtatgggccgccagttgattcaggcggcgctggcattagagggcgtgcagttgggcgctgcgctggagcgtgaaggatcttctttactgggcagcgacgccggtgagctggccggagccgggaaaacaggcgttaccgtgcaaagcagcctcgatgcggtaaaagatgattttgatgtgtttatcgattttacccgtccggaaggtacgctgaaccatctcgctttttgtcgccagcatggcaaagggatggtgatcggcactacggggtttgacgaagccggtaaacaagcaattcgtgacgccgctgccgatattgcgattgtctttgctgccaattttagcgttggcgttaacgtcatgcttaagctgctggagaaagcagccaaagtgatgggtgactacaccgatatcgaaattattgaagcacatcatagacataaagttgatgcgccgagtggcaccgcactggcaatgggagaggcgatcgcccacgcccttgataaagatctgaaagattgcgcggtctacagtcgtgaaggccacaccggtgaacgtgtgcctggcaccattggttttgccaccgtgcgtgcaggtgacatcgttggtgaacataccgcgatgtttgccgatattggcgagcgtctggagatcacccataaggcgtccagccgtatgacatttgctaacggcgcggtaagaagcgctttgtggttgagtggtaaggaaagcggtctttttgatatgcgagatgtacttgatctcaataatttgtaaccacaaaatatttgttatggtgcaaaaataacacatttaatttattgattataaagggctttaatttttggcccttttatttttggtgttatgtttttaaattgtctataagtgccaaaaattacatgttttgtcttctgtttttgttgttttaatgtaaattttgaccatttggtccacttttttctgctcgtttttatttcatgcaatcttcttgctgcgcaagcgttttccagaacaggttagatgatctttttgtcgcttaatgcctgtaaaacatgcatgagccacaaaataatataaaaaatcccgccattaagttgacttttagcgcccatatctccagaatgccgccgtttgccagaaattcgtcggtaagcagatttgcattgatttacgtcatcattgtgaattaatatgcaaataaagtgagtgaatattctctggagggtgttttgattaagagtgcgctattggttctggaagacggaacccagtttcacggtcgggccataggggcaacaggtagcgcggttggggaagtcgttttcaatactagtatgaccggttatcaagaaatcctcactgatccttcctattctcgtcaaatcgttactcttacttatccccatattggcaatgtcggcaccaatgacgccgatgaagaatcttctcaggtacatgcacaaggtctggtgattcgcgacctgccgctgattgccagcaacttccgtaataccgaagacctctcttcttacctgaaacgccataacatcgtggcgattgccgatatcgatacccgtaagctgacgcgtttactgcgcgagaaaggcgcacagaatggctgcattatcgcgggcgataacccggatgcggcgctggcgttagaaaaagcccgcgcgttcccaggtctgaatggcatggatctggcaaaagaagtgaccaccgcagaagcctatagctggacacaagggagctggacgttgaccggtggcctgccagaagcgaaaaaagaagacgagctgccgttccacgtcgtggcttatgattttggtgccaagcgcaacatcctgcggatgctggtggatagaggctgtcgcctgaccatcgttccggcgcaaacttctgcggaagatgtgctgaaaatgaatccagacggcatcttcctctccaacggtcctggcgacccggccccgtgcgattacgccattaccgccatccagaaattcctcgaaaccgatattccggtattcggcatctgtctcggtcatcagctgctggcgctggcgagcggtgcgaagactgtcaaaatgaaatttggtcaccacggcggcaaccatccggttaaagatgtggagaaaaacgtggtaatgatcaccgcccagaaccacggttttgcggtggacgaagcaacattacctgcaaacctgcgtgtcacgcataaatccctgttcgacggtacgttacagggcattcatcgcaccgataaaccggcattcagcttccaggggcaccctgaagccagccctggtccacacgacgccgcgccgttgttcgaccactttatcgagttaattgagcagtaccgtaaaaccgctaagtaatcaggagtaaaagagccatgccaaaacgtacagatataaaaagtatcctgattctgggtgcgggcccgattgttatcggtcaggcgtgtgagtttgactactctggcgcgcaagcgtgtaaagccctgcgtgaagagggttaccgcgtcattctggtgaactccaacccggcgaccatcatgaccgacccggaaatggctgatgcaacctacatcgagccgattcactgggaagttgtacgcaagattattgaaaaagagcgcccggacgcggtgctgccaacgatgggcggtcagacggcgctgaactgcgcgctggagctggaacgtcagggcgtgttggaagagttcggtgtcaccatgattggtgccactgccgatgcgattgataaagcagaagaccgccgtcgtttcgacgtagcgatgaagaaaattggtctggaaaccgcgcgttccggtatcgcacacacgatggaagaagcgctggcggttgccgctgacgtgggcttcccgtgcattattcgcccatcctttaccatgggcggtagcggcggcggtatcgcttataaccgtgaagagtttgaagaaatttgcgcccgcggtctggatctctctccgaccaaagagttgctgattgatgagagcctgatcggctggaaagagtacgagatggaagtggtgcgtgataaaaacgacaactgcatcatcgtctgctctatcgaaaacttcgatgcgatgggcatccacaccggtgactccatcactgtcgcgccagcccaaacgctgaccgacaaagaatatcaaatcatgcgtaacgccagcatggcggtgctgcgtgaaatcggcgttgaaaccggtggttccaacgttcagtttgcggtgaacccgaaaaacggtcgtctgattgttatcgaaatgaacccacgcgtgtcccgttctagcgcgctggcgagcaaagcgaccggtttcccgattgctaaagtggcggcgaaactggcggtgggttacaccctcgacgaactgatgaacgacatcactggcggacgtactccggcctccttcgagccgtccatcgactatgtggttactaaaattcctcgcttcaacttcgaaaaattcgccggtgctaacgaccgtctgaccactcagatgaaaagcgttggcgaagtgatggcgattggtcgcacgcagcaggaatccctgcaaaaagcgctgcgcggcctggaagtcggtgcgactggattcgacccgaaagtgagcctggatgacccggaagcgttaaccaaaatccgtcgcgaactgaaagacgcaggcgcagatcgtatctggtacatcgccgatgcgttccgtgcgggcctgtctgtggacggcgtcttcaacctgaccaacattgaccgctggttcctggtacagattgaagagctggtgcgtctggaagagaaagtggcggaagtgggcatcactggcctgaacgctgacttcctgcgccagctgaaacgcaaaggctttgccgatgcgcgcttggcaaaactggcgggcgtacgcgaagcggaaatccgtaagctgcgtgaccagtatgacctgcacccggtttataagcgcgtggatacctgtgcggcagagttcgccaccgacaccgcttacatgtactccacttatgaagaagagtgcgaagcgaatccgtctaccgaccgtgaaaaaatcatggtgcttggcggcggcccgaaccgtatcggtcagggtatcgaattcgactactgttgcgtacacgccagcctggcgctgcgcgaagacggttacgaaaccattatggttaactgtaacccggaaaccgtctccaccgactacgacacttccgaccgcctctacttcgagccggtaactctggaagatgtgctggaaatcgtgcgtatcgagaagccgaaaggcgttatcgtccagtacggcggtcagaccccgctgaaactggcgcgcgcgctggaagctgctggcgtaccggttatcggcaccagcccggatgctatcgaccgtgcagaagaccgtgaacgcttccagcatgcggttgagcgtctgaaactgaaacaaccggcgaacgccaccgttaccgctattgaaatggcggtagagaaggcgaaagagattggctacccgctggtggtacgtccgtcttacgttctcggcggtcgggcgatggaaatcgtctatgacgaagctgacctgcgtcgctacttccagacggcggtcagcgtgtctaacgatgcgccagtgttgctggaccacttcctcgatgacgcggtagaagttgacgtggatgccatctgcgacggcgaaatggtgctgattggcggcatcatggagcatattgagcaggcgggcgtgcactccggtgactccgcatgttctctgccagcctacaccttaagtcaggaaattcaggatgtgatgcgccagcaggtgcagaaactggccttcgaattgcaggtgcgcggcctgatgaacgtgcagtttgcggtgaaaaacaacgaagtctacctgattgaagttaacccgcgtgcggcgcgtaccgttccgttcgtctccaaagccaccggcgtaccgctggcaaaagtggcggcgcgcgtgatggctggcaaaagcctggctgagcagggcgtaaccaaagaagttatcccgccgtactacagcgtgaaagaagtggtgctgccgttcaataaattcccgggcgttgacccgctgttagggccagaaatgcgctctaccggggaagtcatgggcgtgggccgcaccttcgctgaagcgtttgccaaagcgcagctgggcagcaactccaccatgaagaaacacggtcgtgcgctgctttccgtgcgcgaaggcgataaagaacgcgtggtggacctggcggcaaaactgctgaaacagggcttcgagctggatgcgacccacggcacggcgattgtgctgggcgaagcaggtatcaacccgcgtctggtaaacaaggtgcatgaaggccgtccgcacattcaggaccgtatcaagaatggcgaatatacctacatcatcaacaccaccagtggccgtcgtgcgattgaagactcccgcgtgattcgtcgcagtgcgctgcaatataaagtgcattacgacaccaccctgaacggcggctttgccaccgcgatggcgctgaatgccgatgcgactgaaaaagtaattagcgtgcaggaaatgcacgcacagatcaaataatagcgtgtcatggcagatatttttcatccgctaatttgatcgaataactaatacggttctctgatgaggaccgtttttttttgcccattaagtaaatcttttggggaatcgatatttttgatgacataagcaggatttagctcacacttatcgacggtgaagttgcatactatcgatatatccacaattttaatatggccttgtttaattgcttcaaaacgagtcatagccagacttttaatttgtgaaactggagttcgtatgtgtgaaggatatgttgaaaaaccactctacttgttaatcgccgaatggatgatggctgaaaatcggtgggtgatagcaagagagatctctattcatttcgatattgaacacagcaaggcggttaataccctgacttatattctgagcgaagtcacagaaataagctgcgaagttaagatgatccctaataagctggaagggcggggatgccagtgtcagcgactggttaaagtggtcgatatcgatgagcaaatttacgcgcgcctgcgcaataacagtcgggaaaaattagtcggtgtaagaaagacgccgcgtattcctgccgttccgctcacggaacttaaccgcgagcagaagtggcagatgatgttgagtaagagtatgcgtcgttaattttatctcgttgataccgggcgtcctgcttgccagatgcgatgttgtagcatcttatccagcaaccaggtcgcatccggcaagatcaccgtttaggcgtcacatccgtcgtcccctgcaaacgggggcgattttcctccatttgcctcagtggctgcgtttcatgtaagcttacatgacagcgcccgacaagatcctgatactctttggtattcaaccgtttccagtgtaactcgtcgtcactaacattgcgtacagcgcgggctggcgtacccatcaacaactggcgtttctcgccgcgaaagcccgctttgacaaagctcatggcggcaacaatgctctcttcgccaatgaccgcgccatccataatcacgctgttcatcccgaccaatgcatcgcgaccaatcaaacaaccatgcaggatcgctccgtgcccgatatggccgttttccccaacgatagtgtcagtgtcgcagtagccatgcataatgcagccatcctgaatattggctcccgcttgcacgatcaaccgcccgtagtcaccacgcagactggcgagtgggccgatgtagacaccggctcccacaatcacatcgccaatcaagacggcactgggatggacaaacgccgtcgggtgaaccaccggaattaacccctcaaaggcgtaatagctcacggttgttaacgtcctttccacaccggatcgcgcttctcggcaaacgccagcggcccttcaatggcatcttcgctatgcagaacgcttggatagtgtttcaacacgccgctgcgaatatagcgatacgcttcttctaccggcatttcgctggtggtgcggtagatctctttcagcgccgcaatcgccagcggggcgctgttaaccagctgctgagccagttcgcgggcgttatccatcagttccgcctggctaaccacgcggttgactatcccccaacgcagcgcctcttctgcgcccattcgtctgccggtcatcaccatttcattgacgatggcaggcggcaggatcttcggcagacgcagcacaccgccgctgtcaggaacgatgcccagtttggcttccggcagggcgaagctggcgttatcggcacaaacaataaaatctgccgccagcgccagttcaaagccgccgccaaaggcatagccgttcacagctgcgataaccggtttgtcgagattgaaaatttcggttaatcccgcaaaaccacccggaccaaagtcagcatccggtgcttcgccttctgctgccgcttttaaatcccagcccgcggaaaagaacttctctccggcaccggtaataatggcgacacgtaattgcggatcgtcacggaaatttagaaatacttcgcccatttcaaagctggtttttgcatcaatagcattcgcttttggacgatcaagggtaatttccagaatacttccattgcgggtcagatgtaaactttcactcattccttttctccatttttgctttttcagggagctcaacatccctgcaaaaaatgcatattgttttagagtgtgattattagctggcagggtagttccctgctgtttcatttatttcagattctttctaattattttcccgctgcaattacgtggcagatcttttctgatctccagataagagggcactttaaatttcgccatattttgttcgcagaagcggaaaaattcctcttcgctcaatgtttcaccttcattcagcaccacaaatgctttgatggcttcatcgcgaatgctatctttaatacccacaaccacgatgtcctgaattttcgggtgcgcggcgataatattttccagctccacgcaggagacattctcgccgccacgtttaatcatattgcagcggcgatcgacgaaataaaaaaagtcctcttcgtcgcggtatccggtatcgccggtatgcagccagccatcggcttccagcactttcgcagtggcttgtgggttgagaaagtactctttgaagatggttttcccaggtatgcctttaatgcagatttcaccgatctcaccagccgggagcgggcgattgtgatcgtcgcggatctccgcttcgtagcaaaaccccacccgaccaatgctcggccagcgtcgtttatcgccaggacgatcgccgataatgcccacaatggtttccgtcatcccataagacgtcagcaagcgaacgccgaagcgttcacaaaacgcatctttttcctgctcgctcaagttgagataaaacatcacttcccgcaggcggtgttgctgatcgttcgcactaggcggctgtaccatcaacgtacggatcatcatcggaatacattcggtaacggtggcgcggtacttctgtacctgtccccagaaggcgcgggcgctgtatttctcgaccagcacaaaggtggccccggcagaaaacgccgccatcgccgcagtacactggcaatcgatatgaaacgcaggcattaccgtcaggtagacgtcatcgtcacgcagtgcacactgccaggcggagtaatatccagcgaagcgcaggttgtaatgggtaatcaccacacctttcggtcgggaggtggtgccggaggtgaagagaatttccgccgtatcgtcagtgcttagcggcggtgcatagcacaaggtggcaggttgttgatttttcagttgagtaaagctactcacgccatcatcagcgggaagtgccacatctgtcaggcaaatgtgccgcaattgagtggcatcttcctgctgaatctgttgatacataggatagaattgcgcactggtcaccagcaggcacgcctggctattttgcaggatccacgcgctttcctcgcacaacaggcgggcgttaatcggcaccataatcgcgccaatttttgccagcccgaaccagcaaaagataaattccgggcagttgtcgagatgtagtgcaaccttgtcgcctttgcgaatccccagcgtataaaacaggtttgccgtgcggttaatctcctgatttaactcaagataactataccggttaacgactccgccgctggattcacaaatcagcgccgttttatgaccgtaaacgtccgcaagatcgtcccacatttgacgtagatgttgtccgccaatgatatccattgcacctctatccatttttgttcgtttgttattgggcgggcgctagtcaggcaagccgactgacgccacgcgtttagtcctcaactttggccagacctttgctgaccaactcctgaatgtcgttttcgctgtagccgatatttttcaaaatggcagccgtgtccataccatgactgggcattccgcgccagatttgtccggggttatttttgaatttcggcatgatgttcggccctttgcaggtgcgaccatccatcgtttgccactgagtgatactttcgcgagccacatactgtggattgctttccagttccggtacggtcagcactttggcgcaggcgatattcagttcagcaaagcgttcttttacttccgcgatggtatgtgtcgccagccaggcatcgagtttctcttcaaccagtgggccgtaagggcattcgatacggtggataagctgagtgccttccgggatttctggcgtgccaagcagatgtgcgaggccaatatctttaaagcactcttcaatttgggtaatgcccaccagttccatcacgatgtagccgtcggcacatttatacagaccgcaaccggcgtagtagggatctttacctttgctcatgcgcgggcacatttcgccgccgttgaagtaatccatcatgaagtactggcccatacgcagcatcacttcatacatggcgatgtcgatactttcgcctttaccggtttcacgcactttatgcagtgctgccagcgccgccgtggtggcggtcaggccagaaaagtaatcggcggtatacgggaaggcaggcattggctggtcaacatcaccgttctgaatcaggtaaccactaaaggcctgggcgatagtgttataggccggaagattggtgtactcctcggtgccgtactgaccaaaaccggacaggtgagcgataaccagtttcgggttgtgctgccacagtacttcatcggtaatgccacgacgggcaaaggccggacctttactggcttcgatgaagatatcggtggtttccattaatttcagaaacgcttcgcggccttcatctttgaaaatatttaagctcagcgcgtgcaaattgcggcgggagagttgcgggtagttcggttgaacgcgaatggtgtcggcccaggcgacgttctcgatccagataacttccgcgccccattctgcgaacatttgcccggcaaacggtccggcgatttcgataccggagaagacaacgcgcaatccggccaacggcccgaatttcggcatgggtagatgatccattatttgctcctgaaaaatttatgtagcgcatgactgccggatgcggcgtaaacgctttatccggcctacattcgtgctcccgtaggcctgataagacgcatcagcgtcgcatcaggcagcgcacggacttagcggtattgcttcagcaccgcacgacccagcgtcaggatctgcatttcgtcagatcccccggagacgcggtctacacgcagatcacgccagaagcggctgatgcggtggttgcccgcaatcccgacaccgcccagcacctgcattgcgctatccacaacttcaaatgccgcattggcgcagaagtatttgcacatcgctgcatcgccagaggtgatggtgccgttgtctgctttccacgctgcttcatacagcatgtttttcatggagtttaatttgatcgccatgtgggcgaatttttcctgaatcaactggaaacgaccaatagcctcgccaaactgcacgcgctgattggcgtagcgcgccgcatcttcaaaggcgcacatcgccgtaccgtagttggtgagggctaccaggaaacgttcatggtcgaactcttctttgacgcggttaaagccgttaccttcccgaccgaacatgtctttctcgtccagttccacgtcgtcaaaggtgatttcacagcagctatccatacgcagaccgagcttttcaagtttggtcactttgatgcccggtttgctcatatcaacaaaccattcggtgtagacaggtttgtccggagaagccccgtcgcgcgccatcaccacgatgtacggggtgtaggcgctgctggtaataaaacacttactaccattaagataaatcttaccatttctacgggtataagtcgttttcaggctacccacgtcggagcccgcgcccggttcggtaatcgcactgttccacatctgcttaccggtgccgcggaaagccataattttgtcgatctgctcttgtgtgccttcgcgcaggaaggtgttgaacccgcccggcaactggtacagcacataggttggtgcccccagacgtcccagctccatccacacggcggcgagagtaacaaaccccgcgtccagaccaccgtgctcttcagggatcagcagactgtcgatacccatatccgccagtgctttgacaaaacgttccgggtagacgctgtcacggtcgcactcggcaaaataggcctcccagttttcgctggccatcagttcgcggataccggcgacaaacagttcctgctcatcatttaaattaaaatccatctttcaacctcttgatattttgggggttaattaatctttccagttctgtttcgcgtctttaataaaggagagcgtcaccataatgttgacgaagaacagcgggcatcctccggcgataatggcggtttgaatcggtttcaggccgccgagcgccagcagaacaataccgataatgccaaccagaatactccaaccgatacgcaccagcagaggtggttcttcaccatcgcgtacttcgcggcaagtggacatcgccagggtataagagcaggcgttaaccagcgtaacggtggcaataaagcagaggatgaagaagccccacatggtggcggtgctgagtggcagagcggcccaggtttcaatgatggcgcgcgccacaccgtactgttcgatcagatttggaatgttgatgatgtttttatctatcaacagcagagtgttactaccgagtacagtccacaggatccaggtactcgctgtcagccccagcaccatgccgaagcacagttcacgcacagtacgaccacgggagatgcgggcgaggaagatactcatctggatagcataaatcacccaccatgcccagtagaacacggtccagccctgcgggaagccgcctttagcgatgggatcggtatagaacaacatgcgcggcagatacatcagcaacatccccacgctatcggtgaagtagttcatgatgaagctggcaccgctgacaatgaacacccaacccagcatcaggaagctcaggtaactacgcacgtcactggcgatacgtacccctttttgcagaccgcaagcgacgcaaatggcgttgaggataatccagcaggtaatgatgatagcgtccagttgcagggtatgcggaatgccaaacaaccattgcatacactcggtcaccagcggcgtggcaaggcccagactggtacccatcgcgaagatcaaggcgacgagatagaagttgtcgacgatagtgccgaacaaccctttggcgtgtttttcacctaccagcggcaccagtgtgctgctggggcgaatcacttccattttgcggacaaagaagaagtaagcgaaggcgacactaaggaagctgtaagtggcccacggcagaggtccccagtggaacaagctgtaagccagccccaactctttcgcccctgtgctgttcggttctaagccaaacggcggggtggagatgtagtagtagatctcaatgcttccccagaacagtacggcagcagacgtacaggaggcgaacatcataaagatccaactggcggtgctaaattctggcggttcgttacctaaacgctttttggcatacgggccaaacaccagccagaaccaaccgaaaagcatcaccaccatataccattcaaatgcccatccccatacattggtgacgtaactgaatacagcattaataacgacattcgctgcatccagatctctgactgtaagccaacaaagtatgccgacgattattaacggcggaaagaaaaccttcggttctattcccgtttttctcttttcattcttcatgagttaattccactgtgaaaacgaatatttattttgcgttcccgtttgttttatttttgttaacatttaatataattattattaacctcgtggacgcgttaatggctaactcataatgggtattcaataagctgtattctgtgattggtatcacatttttgtttcgggtgaatagagggcgttttttcgttaattttgattaataatcagtttgttatgctctgttgtgagtaaaaaataacatctgactttcaatattggtgatccataaaacaatattgaaaatttctttttgctacgccgtgttttcaatattggtgaggaacttaacaatattgaaagttggatttatctgcgtgtgacattttcaatattggtgattaaagttttatttcaaaattaaagggcgtgatatctgtaattaacaccaccgatatgaacgacgtttccttcatgatttctggagatgcaatgaagattattacttgctataagtgcgtgcctgatgaacaggatattgcggtcaataatgctgatggtagtttagacttcagcaaagccgatgccaaaataagccaatacgatctcaacgctattgaagcggcttgccagctaaagcaacaggcagcagaggcgcaggtgacagccttaagtgtgggcggtaaagccctgaccaacgccaaagggcgtaaagatgtgctaagccgcggcccggatgaactgattgtggtgattgatgaccagttcgagcaggcactgccgcaacaaacggcgagcgcactggctgcagccgcccagaaagcaggctttgatctgatcctctgtggcgatggttcttccgacctttatgcccagcaggttggtctgctggtgggcgaaatcctcaatattccggcagttaacggcgtcagcaaaattatctccctgacggcagataccctcaccgttgagcgcgaactggaagatgaaaccgaaaccttaagcattccgctgcctgcggttgttgctgtttccactgatatcaactccccacaaattcctagcatgaaagccattctcggcgcggcgaaaaagcccgtccaggtatggagcgcggcggatattggttttaacgcagaggcagcctggagtgaacaacaggttgccgcgccgaaacagcgcgaacgtcagcgcatcgtgattgaaggcgacggcgaagaacagatcgccgcatttgctgaaaatcttcgcaaagtcatttaattacaggggatgctatgaacacgttttctcaagtctgggtattcagcgataccccttctcgtctgccggaactgatgaacggtgcgcaggctttagctaatcaaatcaacacctttgtcctcaatgatgccgacggcgcacaggcaatccagctcggcgctaatcatgtctggaaattaaacggcaaaccggacgatcggatgatcgaagattacgccggtgtcatggctgacactattcgccagcacggcgcagacggcctggtgctgctgccaaacacccgtcgcggcaaattactggcggcaaaactgggttatcgccttaaagcggcggtgtctaacgatgccagcaccgtcagcgtacaggacggtaaagcgacagtgaaacacatggtttacggtggtctggcgattggcgaagaacgcattgccacgccgtatgcggtactgaccatcagcagcggcacgttcgatgcggctcagccagacgcgagtcgcactggcgaaacgcacaccgtggagtggcaggctccggctgtggcgattacccgcacggcaacccaggcgcgccagagcaacagcgtcgatctcgacaaagcccgtctggtggtcagcgtcggtcgcggtattggcagcaaagagaacattgcgctggcagaacagctttgcaaggcgataggtgcggagttggcctgttctcgtccggtggcggaaaacgaaaaatggatggagcacgaacgctatgtcggtatctccaacctgatgctgaaacctgaactgtacctggcggtggggatctccgggcagatccagcacatggttggcgctaacgcgagccaaaccattttcgccatcaataaagataaaaatgcgccgatcttccagtacgcggattacggcattgttggcgacgccgtgaagatccttccggcgctgaccgcagctttagcgcgttgatccactctggcagggctgcattttggccctgccgctgacagggagctcttatgtccgaagatatctttgacgccatcatcgtcggtgcagggcttgccggtagcgttgccgcactggtgctcgcccgcgaaggtgcgcaagtgttagttatcgagcgtggcaattccgcaggtgccaagaacgtcaccggcgggcgtctctatgcccacagtctggaacacattattcctggtttcgccgactccgcccccgtagaacgcctgatcacccatgaaaaactcgcgtttatgacggaaaagagtgcgatgactatggactactgcaatggtgacgaaaccagcccatcccagcgttcttactccgttttgcgcagtaaatttgatgcctggctgatggagcaggccgaagaagcgggcgcgcagttaattaccgggatccgcgtcgataacctcgtacagcgcgatggcaaagtcgtcggtgtagaagccgatggcgatgtgattgaagcgaaaacggtgatccttgctgatggggtgaactccatccttgccgaaaaattggggatggcaaaacgcgtcaaaccgacggatgtggcggttggcgtgaaggaactgatcgagttaccgaagagcgttattgaagaccgttttcagttgcagggtaatcagggggcggcttgcctgtttgcgggaagtcccaccgatggcctgatgggcggcggcttcctttataccaatgaaaacaccctgagcctggggctggtttgtggtttgcatcatctgcatgacgcgaaaaaaagcgtgccgcaaatgctggaagatttcaaacagcatccggccgttgcaccgctgatcgcgggcggcaagctggtggaatattccgctcacgtagtgccggaagcaggcatcaacatgctgccggagttggttggtgacggcgtattgattgccggtgatgccgccggaatgtgtatgaacctcggttttaccattcgcggtatggatctggcgattgccgccggggaagccgcagcaaaaaccgtgcttagtgcgatgaaaagcgacgatttcagtaagcaaaaactggcggaatatcgtcagcatcttgagagtggtccgctgcgcgatatgcgtatgtaccagaaactaccggcgttccttgataacccacgcatgtttagcggctacccggagctggcggtgggtgtggcgcgtgacctgttcaccattgatggcagcgcgccggaactgatgcgcaagaaaatcctccgccacggcaagaaagtgggcttcatcaatctaatcaaggatggcatgaaaggagtgaccgttttatgacttctcccgtcaatgtggacgtcaaactgggcgtcaataaattcaatgtcgatgaagagcatccgcacattgttgtgaaggccgatgctgataaacaggcgctggagctgctggtgaaagcgtgccccgcaggtctgtacaagaagcaggatgacggcagtgtgcgcttcgattacgccggatgtctggagtgcggcacctgtcgcattctggggctggggagcgcgctggaacagtgggaatacccgcgcggcacctttggtgtggagttccgttacggctgatgttggtttgatacgtaacgccgcactgactctcattgcaaaaaacaggaataaccatgcaaccgtccagaaactttgacgatctcaaattctcctctattcaccgccgcattttgctgtggggaagcggtggtccgtttctggatggttatgtactggtaatgattggcgtggcgctggagcaactgacgccggcgctgaaactggacgctgactggattggcttgctgggcgcgggaacgctcgccgggctgttcgttggcacaagcctgtttggttatatttccgataaagtcggacggcgcaaaatgttcctcattgatatcatcgccatcggcgtgataagcgtggcgacgatgtttgttagttcccccgtcgaactgttggtgatgcgggtacttatcggcattgtcatcggtgcagattatcccatcgccaccagtatgatcaccgagttctccagtacccgtcagcgggcgttttccatcagctttattgccgcgatgtggtatgtcggcgcgacctgtgccgatctggtcggctactggctttatgatgtggaaggcggctggcgctggatgctgggtagcgcggcgatcccctgtttgttgattttgattggtcgattcgaactgcctgaatctccccgctggttattacgcaaagggcgagtaaaagagtgcgaagagatgatgatcaaactgtttggcgaaccggtggctttcgatgaagagcagccgcagcaaacccgttttcgcgatctgtttaatcgccgccattttccttttgttctgtttgttgccgccatctggacctgccaggtgatcccaatgttcgccatttacacctttggcccgcaaatcgttggtttgttgggattgggggttggcaaaaacgcggcactagggaatgtggtgattagcctgttctttatgctcggctgtattccgccgatgctgtggttaaacactgccggacggcgtccattgttgattggcagctttgccatgatgacgctggcgctggcggttttggggctaatcccggatatggggatctggctggtagtgatggcctttgcggtgtatgcctttttctctggcgggccgggtaatttgcagtggctctatcctaatgaactcttcccgacagatatccgcgcctctgccgtgggcgtgattatgtccttaagtcgtattggcaccattgttagcacctgggcactaccgatctttatcaataattacggtatcagtaacacgatgctaatgggggcgggtatcagcctgtttggcttgttgatttccgtagcgtttgccccggagactcgagggatgagtctggcgcagaccagcaatatgacgatccgcgggcagagaatggggtaaattgttcagatttctctcttttctgaatcaatattattgactataagccgcgtgaatatatgactacactttgtgggaaaacaaaggcgtaatcacgcgggctacctatgattcttataatttatgcgcatccgtatccgcatcattcccatgcgaataaacggatgcttgaacaggcaaggacgctggaaggcgtcgaaattcgctctctttatcaactctatcctgacttcaatatcgatattgccgccgagcaggaggcgctgtctcgcgccgatctgatcgtctggcagcatccgatgcagtggtacagcattcctccgctcctcaaactttggatcgataaagttttctcccacggctgggcttacggtcatggcggcacggcgctgcatggcaaacatttgctgtgggcggtgacgaccggcggcggggaaagccattttgaaattggtgcgcatccgggctttgatgtgctgagccagccgctacaggcgacggcaatctactgcgggctgaactggctgccaccgtttgccatgcactgcacctttatttgtgacgacgaaaccctcgaagggcaggcgcgtcactataagcaacgtctgctggaatggcaggaggcccatcatggataattaaggaatggcaggaggcccatcatggatagccatacgctgattcaggcgctgatttatctcggtagcgcagcgctgattgtacccattgcggtacgtcttggtctgggaagcgtacttggctacctgatcgccggctgcattattggcccgtgggggctgcgactggtgaccgatgccgaatctattctgcactttgccgagattggggtggtgctgatgctgtttattatcggcctcgaactcgatccacaaaggctgtggaagctgcgtgcggcagtgttcggctgtggcgcattgcagatggtgatttgcggcggcctgctggggctgttctgcatgttacttgggctgcgctggcaggtcgcggaattgatcggcatgacgctggcgctctcctctacggcgattgccatgcaggcgatgaatgaacgcaatctgatggtgacgcaaatgggtcgcagtgcctttgcggtgctgctgttccaggatatcgcggcgatcccgctggtggcgatgattccgctactggcaacgagcagtgccagcacgacgatgggcgcatttgctctcagcgcgttaaaagtggcgggtgcgctggtgctggtggtattgctggggcgctatgtcacgcgtccggcgctgcgttttgtagcccgctctggcttgcgggaagtgtttagtgccgtggcgttattcctcgtgtttggctttggtttgctgctggaagaggtcggcttgagcatggcgatgggcgcgtttctggcgggcgtactgctggcaagcagcgaataccgtcatgcgctggagagcgatatcgaaccatttaaaggtttgctgttggggctgtttttcatcggtgttggcatgagcatagactttggcacgctgcttgaaaacccattgcgcattgtcattttgctgctcggtttcctcatcatcaaaatcgccatgctgtggctgattgcccgaccgttgcaagtgccaaataaacagcgtcgttggtttgcggtgttgttagggcagggcagtgagtttgcctttgtggtatttggcgcggcgcagatggcgaatgtgctggagccggagtgggcgaaaagcctgaccctggcggtggcgctgagcatggcagcaacgccgattctgctggtgatcctcaatcgccttgagcaatcttctactgaggaagcgcgtgaagccgatgagatcgacgaagaacagccgcgcgtgattatcgccggattcggtcgttttgggcagattaccggacgtttactgctctccagcggggtgaaaatggtggtactcgatcacgatccggaccatatcgaaaccttgcgtaaatttggtatgaaagtgttttatggcgatgccacgcggatggatttactggaatctgccggagcggcgaaagcggaagtgctgattaacgccatcgacgatccgcaaaccaacctgcaactgacagagatggtgaaagaacatttcccgcatttgcagattattgcccgcgcccgcgatgtcgaccactacattcgtttgcgtcaggcaggcgttgaaaagccggagcgtgaaaccttcgaaggtgcgctgaaaaccgggcgtctggcactggaaagtttaggtctggggccgtatgaagcgcgagaacgtgccgatgtgttccgccgctttaatattcagatggtggaagagatggcaatggttgagaacgacaccaaagcccgcgcggcggtctataaacgcaccagcgcgatgttaagtgagatcattaccgaggaccgcgaacatctgagtttaattcaacgacatggctggcagggaaccgaagaaggtaaacataccggcaacatggcggatgaaccggaaacgaaacccagttcctaataaagagtgacgtaaatcacactttacagctaactgtttgtttttgtttcattgtaatgcggcgagtccagggagagagcgtggactcgccagcagaatataaaattttcctcaacatcatcctcgcaccagtcgacgacggtttacgctttacgtatagtggcgacaattttttttatcgggaaatctcaatgatcagtctgattgcggcgttagcggtagatcgcgttatcggcatggaaaacgccatgccgtggaacctgcctgccgatctcgcctggtttaaacgcaacaccttaaataaacccgtgattatgggccgccatacctgggaaagtatcggtcgtccgttgccaggacgcaaaaatattatcctcagcagtcaaccgggtacggacgatcgcgtaacgtgggtgaagagcgtggatgaagccatcgcggcgtgtggtgacgtaccagaaatcatggtgattggcggcggtcgcgtttatgaacagttcttgccaaaagcgcaaaaactgtatctgacgcatatcgacgcagaagtggaaggcgacacccatttcccggattacgagccggatgactgggaaagcgtattcagcgaattccacgatgctgatgcgcagaactctcacagctattgctttgagattctggagcggcggtaattttgtatagaatttacggctagcgccggatgcgacgccggtcgcgtcttatccggccttcctatatcaggctgtgtttaagacgccgccgcttcgcccaaatccttatgccggttgctcggctggacaaaatactgtttatcttcccagcgcaggcaggttaatgtaccaccccagcagcagccggtatccagcgcgtatataccttccggcgtacctttgccctccaggcttgcccagtgaccaaaggcgatgctgtattcttcagcgacagggccaggaatcgcaaaccacggtttcagtggggcaggggcctcttccgggctttctttgctgtacatatccagttgaccgttcgggaagcaaaaacgcatacgggtaaaagcgttggtgataaaacgcagtcttcccagcccccgcaattccggactccagttatttggcatatcgccgtacatggcatcaagaaagaagggataggagtcactgcttagcaccgcttctacatcgcgtgcgcactctttggcggtctgcagatcccactgcggcgtgatccctgcgtgggccatcaccagctttttctcttcgtcgatttgcagcagaggctggcgccgcagccagttaagcagctcgtcggcatccggcgcttccagcagcggtgtcaggcgatctttcggtttattgcggctgatcccggcaaataccgccagcagatgcagatcgtgattgcccagcaccagacgtacgctgtcgcctaaggatttcacatagcgcagaacatccaggctacccggcccgcgcgcgaccagatcgcccgtcagccagagggtatctttcccaggggtaaattctactttatgcagcaatgcgatcagttcatcgtaacaaccatgaacgtcgccaataaggtatgtcgccatattcttttaatgaatgagtgtgggaacggcgagtcggaatacgggaatgtcgatgctgaaagggacgccattttcatcgatcatttcgtagtgaccctgcatggtgcccagcggggtttcaatgattgcaccgctggtgtactggtactcttcgccaggcgcgataagtggctggacgccaaccactccttcgccctggacttcggtttcacggccattgccattggtgatcagccagtaacgccccaacaactgcactggcgctcgccccagattgcgtatggttacggtataagcaaaaacgtaacgttcattatcaggactagattgagcctcaatgtagacgctttgaacctgaatacacactcgggggctattgatcatcgttaactctcctgcaaaggcgcgttctccgccagatagttcgccatctggcaatattgcgcgacagagatattttccgctcgcatcgccgggtcgatccccattcccgttaacacctcgacgctaaacaggttgccgaggctgttacgaatggttttacgacgctggttaaaggcttcggtggtgatgcggctcaacacacgaacatctttaaccgggtgaggcatcgttgcatgaggaaccaggcgcacgacggcggaatccactttgggtggtggtgtaaaggcactcggcggtacttccagtaccgggatcacattgcaatagtattgcgccatgacgcttaatcgaccatacgctttgctgttcggtcctgcaaccagacgattcaccacctctttttgcaacataaagtgcatgtcggcaatggcatcagtatagctaaacagatggaacatcaacggcgtggagatgttataaggcaggttgccgaaaacacgcagcggctgacccattttctcggccagttcaccaaagttaaaggtcatcgcatcctgctgataaatcgtcagtttcgggcctaagaatggatgcgtttgcagacgtgccgccagatcgcggtcaagttcgatgaccgtcagctggtccagacgttcgccgaccggttcggtcaatgccgccagaccggggccgatttcgaccatcgcctggcccttttgcgggttaatggcagacacaatactgtcgatcacgaactgatcgttgagaaagttttgcccgaagcgtttacgggctaagtggccctggtggactcgattattcattgggtgttaacaatcattttgatggcgagattaagcgccgtaataaaactgccggcatcggctttgccacgtcccgccagttcaagcgcggtgccgtggtccacacttgtgcgaataaagggcaggcccagcgtaatgttcacaccgcgcccgaagccctggtattttagcacgggaagaccctgatcgtggtacatcgccagcacggcgtcggcgttatcaagatatttcggctgaaacagggtatcggcaggcagcggcccgttgagtttcatcccctgcgcccgcagctcattgagcaccggaataatggtgtctatctcttccgtacccatatgaccgccttcgcccgcgtgcggattcagcccgcagaccagaatgcgcggttcggcaataccaaatttggtccgcaaatcgtgatgcaaaatagcaatcacttcgtgcaaaagtgcaggggtgatagcgtctgcgatatcgcgcagcggtaaatgcgtcgttgccagcgccacgcgaagttcttcggtcgccagcatcatcaccacctttttcgcctggctacgctcttcgaaaaactcggtatgaccggtaaaaggaatgccagcgtcgttaataacgcctttatgcaccggacctgtgatcagcgcggcaaattcgccgttcagacaaccatcgcacgctcgcgccagcgtttccaccacataatgcccattttcaaccgctaactgccccgcagtgacaggtgcacgtagcgcgacaggaagtagcgttaatgtgcccgcagtttgcggttgtgcaggggagttgggggaataagggcggagggtgagcggcaaaccgagcatcgctgcccggttggtaaggagagtggcatcggcacaaacaaccagttcgaccggccactcacgctgtgcaagctggacaactaagtccgggccaatcccggcgggctcgccgggagtgatcacaacacgttgggttttaaccattagttgctcaggattttaacgtaggcgctggcacgttgttcctgcatccagcttgctgcttcttcgctgaacttacggttcatcagcatgcggtatgcacgatctttctgcgcagcgtcggttttatcgacattacgggtatccagcagttcgattaaatgccagccgaaactagagtgaaccggtgcactcatttgacctttgttcaggcgagtcagggcgtcacggaaggccggatcgaaaatatctggtgtagcccagccgagatcgccgccctggttagcagagcctggatcctgagagaactctttcgctgcggcagcaaaagtcgttttaccactcttgatatcagcagcaatctgttccagtttcacacgggcctgttcgtcagtcatgatcgggctcggtttcagcagaatatggcgagcatgaacttcggtcacgctgatatttttgctttcgccgcgcaggtcgttaactttcagaatatggaagccaacgccggaacgaatcgggccaacaatgtcgcctttcttcgcggtgcttaatgcctgggcgaagatcccgggcaactcctgaatacggccccagcccatctggccgccgttcagcgcctgctggtcggcagaatgagcaatcgccagcttaccgaaatcagcgccgttacgcgcctgatcgacaatggcgcgcgcctggctttccgcttcgttcacctgatcagaggtcgggttttccggcagcgggatcaggatgtggctcaggttcagctcagtgctggcgtcgttttggttacccacctgctgcgccagggattcgacttcctgcggcaggatggtgatgcgacgacgcacctcgttgttacgcacttcagagataatcatctctttgcggatctggttacgataggtgttgtagttcagtccatcgtaagccagacggctgcgcatctgatccagcgtcatgttgttctgtttcgcgatgttagcaatcgcctgatccagctgctcatcggagattttcactcccattttctgccccatctgcaggatgatttgatccatgatcaaacgttccatgatttggtggcgcagcgtcgcgtcatcaggaagttgctgccttgcctgagcagcgttcagttttacgctctgcattaatccatcaacgtcgctttccagcacgacgccgttattgacgacggctgcgactttatcgactacctggggggcagcgaaactggtattcgcgatcatggcgataccgagaagcagcgttttccagttcttcatactttttccatttcaattaaccgcactgcggattacgtggtaaatcaacaaatcacaaagtgttttgatacggcagaatgttgctacgcagcatctcttgcgtacccagaccgtagttggagctcaggccgcgaagttcgatgttaaagccgattgcgttgtcatataccgcatgttgtttatcgttatcccaaccgttcagcttccgctcgtaaccgacgcgaattgcatagcagcaggagctgtattgcacacctaacatagagtcggcttgcttgttagcattggtgtcgtagtagtaggccccaacaatggaccaacgatcggcaattggccagctggcgacagcacctacctggctaataccattcttatattgctcagcagtggaatagtacttaggcagcgtagcctgaatatattccgggctggcgtaacggtaattcagctgtaccagacggtcttcatcccgacggtattcaatgctggagttactggtcgctacgttatccagacgtgtatcgtactgaatcccgccacgcaatccccaacgctcggagatacgccagtaagtatcgcctgcccacaccagactacccgttttgtcgtcattctcccatgttatgttgtcatcgccagtgcgagactccgtgaaatagtagatttgaccaacggaaatattaaaacgttcaacggcagcatcatcatatatgcgagatgtgacaccggtcgtcacctggttagcggaggcaatacggtcaagaccgccgtaagtccggtcccggaacaggccagagtagtcagattgcagcagagagctgtcgtagttatagatgtcgctctgatcgcgatacggcacgtacaaatactgcgcgcgcggttccagcgtttgggtataacccggagccagcatttccatatcgcgttcaaagaccattttgccgtcaactttgaattgcggcattacgcggttaacggattcgtccagcttggtcgtgtttctggagttataccagtcaagattggtttgctgataatgggttgccagcaacttcgcttcggtattgatgctgccccagttattagagagcggcaaattgatggtcggttccaggtgaacacgggttgcttcaggcatgtcgtctctggtgttaacaaagtgcactgcctggccgtaaatacgcgtatcaaacggaccaacatcattctggtagtaattaacgtctaactgcggctctgcgctgtagctactggtgttctgttcgctgaaaacctggaactgcttggtactaacggtggcattgaagttttgcaccgcatagccaacgctgaatttttgcgttgcgtagccgtcagtactggaaccgtacttgttatcgaaatcattgaagtagctaggatcgctgaccttggtgtagtcgacgttgaaacgccacacctgatccatgaccccggagtggttccagtagaataaccaacgacgactactgtcatcgttcgggtgttcatcttcatagactttatcactaggcagatagtccagttccatcaagccagcgcccgcctgggagaggtagcggaattcgttctcccacatgatgttgccacgacgatgcatataatgcggcgtgatggtggcatccatatttggcgcgatgttccagtaatatggcaggtagaactcaaagtagttggtggtggtgtacttggcgttcgggatcaagaaaccagagcgacgtttgtcacccaccggcaactgcaaataggggctataaaagatcggtaccggacccaccttaaagcgggcgttccagatctccgcaacttgttcttcgcggtcatgaataatttcgctacctaccacgctccaggtgtcagaacccggcagacaggaggtaaagctaccgttatccagaatggtatagcggttttcgccacgttgtttcatcaggtccgctttaccgcgaccctggcgacccaccatctggtaatcaccttcccagacgttggtatctttggtgttcagattcgcccagcctttcggccctttgaggatcacctggttatcgtcgtaatggacattaccgagcgcatcaacggtacgtaccggctccggttgtcctggtgcctctttttgatggagctgcacttcgtcggcctgcagacggctgttaccctgcatgatatccacgctgccagtaaacacggcgtcatccgggtagtcccctttcgcgtggtcagcattgatagtcacgggtaagtcattggtatcgccctgtaccagaggacggtcatagcttggcacgcccaacatgcactgactggcgaggtcggctgccagtccctgttgactataaagggcggtggcaatcatggtggccaggagagtggggatacgttttttcatacgttgattttattgttccatcatcggtaacgttgcgcgtgacaaacggtcagagactaacgtactcgtcatctctacgctagtgttaatcctgtccgaatagcgtcagtggtgttaggcacggcattgaatgacaggtatgataatgcaaattataggcgatgtcccacaattgaccgcagccggaaaacggtaaaagcacctttatattgtgggagatagccctgatatccgtgtgtcgatttggggaatatatgcagtattggggaaaaatcattggcgtggccgtggccttactgatgggcggcggcttttggggcgtagtgttaggcctgttaattggccatatgtttgataaagcccgtagccgtaaaatggcgtggttcgccaaccagcgtgagcgtcaggcgctgttttttgccaccacttttgaagtgatggggcatttaaccaaatccaaaggtcgcgtcacggaggctgatattcatatcgccagccagttgatggaccgaatgaatcttcatggcgcttcccgtactgcggcgcaaaatgcgttccgggtgggaaaaagtgacaattacccgctgcgcgaaaagatgcgccagtttcgcagtgtctgctttggtcgttttgacttaattcgtatgtttctggagatccagattcaggcggcgtttgctgatggtagtctgcacccgaatgaacgggcggtgctgtatgtcattgcagaagaattagggatctcccgcgctcagtttgaccagtttttgcgcatgatgcagggcggtgcacagtttggcggcggttatcagcagcaaactggcggtggtaactggcagcaagcgcagcgtggcccaacgctggaagatgcctgtaatgtgctgggcgtgaagccgacggatgatgcgaccaccatcaaacgtgcctaccgtaagctgatgagtgaacaccatcccgataagctggtggcgaaaggtttgccgcctgagatgatggagatggcgaagcagaaagcgcaggaaattcagcaggcatatgagctgataaagcagcagaaagggtttaaatgaccctgtaaatgatgctgagtaactgcccacgattaaaggtggccgccctggcggtcacttctttgagaaaaggcgtttactcagaatggtggacaggctcaatgcacgatttacgggaggggttctgtaggttttatcgcgttgaccctgcttaaggttgagagctttacgacgagcggaattatatttttacgtcttaaaaataaaaaacacatacctgaatgagcgatttttgaaagtatatttattcagaacgcgcatcatgagtttttaactcaatgcgaggctattaccatgaaagtaagtgttccaggcatgccggttacacttttaaatatgagcaagaacgatatttataagatggtgagcggggacaagatggacgtgaagatgaatatctttcaacgcttgtgggagacgttacgccatctgttctggagtgataaacagactgaggcttataaacttctgttcaatttcgtgaataaccagactggcaacatcaacgccagtgaatactttactggggctatcaacgagaatgagagagaaaagtttatcaatagcctggaattattcaataaacttaaaacatgcgcaaaaaatccggatgagttggtcgcaaagggcaatatgcgctgggtcgcccagaccttcggggatatcgagttaagtgtcacttttttcattgaaaagaataagatatgtactcagacgttgcagctgcataagggccaaggtaacttgggcgttgatcttagaaaggcttaccttcccggcgttgacatgagggattgttaccttggtaaaaaaacaatgaaaggtagcaatgatatcctttatgagagacctgggtggaatgctaacctgggcgtgctaccccggacggtgctaccccggacggtgctaacccggacggtgctaacctggacggtgctaccgtgaacggtgctacctccttatatgatgaggtaattattattaataaaatcccccccaaaaaaattgatactaaaggagttgctactgaagaagttgctactaaaaaagtactgctgaacaaattactgacaacgcaattattgaatgagccagaataagctaaggttgaaggggctggaacgccccttcaaccttagcagtagcgtgggatgatttcacaattagaaagacctgcatgatgagctagagaagaggctagtgacgcaaggcgtcgtgcaggacacggatcaccgagatgggcatcgccaaccagactgctaattagcccatgaataacaatcagaaaggaccataacagacccgttaaaatgaaatataagagacggtcaacgggtgaagaaaaagttcaaaaattcgctgtggagcaggaagggaattaccgaatggaaagcgtagccacacgcaacaactgaaagcagtttggcagaaacaaaaaatccccggactcggggatttatgtacaagaggcagcccttaggatgagggtataaacgtacaggaaaggttaaaaatccgctggcgctttaaacgtcatactattgccatacgccggatgggtaatcgtcaacatctctgcatgtagcaacaaacgtggtgccatcgctctcgcttctggacttgcataaaaacgatcgccgagaatcggatgacccagcgccagcatatgcacacgcaattgatggctacgcccggtaatcggttttaacaccactcttgccgtgttatccgccgcatactccaccacttcatattccgtctgcgcaggtttacccgtttcgtaacagactttctgtttcgggcggtttggccagtcgcaaatcagcggcagatccaccagaccttctgcgggggatggatgcccccagacgcgggccacatactgctttttcggctcgcgctcgcggaactggcgttttaactcccgctccgcggctttggtcagcgccactacaatcacgccgctggtagccatatccagacgatgcacgctttctgcctgcggataatcacgctgaatgcgcgtcatcacgctgtctttgtgctcttccagacgacccggcacactcaacaaaccgctcggcttgttgaccaccataatatggtcatcctgatacaggataaccaaccagggttcctgcggtggattgtagttttccatccccattttcggctccgttactgatgcgttacaacgatcaaacgcagggcatccagacgccaacctgcctgatccaggctttccattacctgctgacggttgctctcaatggcggtcagttcgtcgtcacgaatgttcgggttcactgcacgcagagcttccagacgagacagctcggcagacagtttttcgtcggcttcgttacgcgctgcatcaatcaatgcacgggcagatttctcgatctgcgcttcacccagttgaaggatagcgtgaacatcctgctgcacggcgttaaccagtttgctgccggtgtgacggttaaccgcgttaagctggcggttaaaggtttcaaactctacctgcgccgccaggttgttgccgtttttatccagcagcatacgtaccggcgtcggtggcaggaagcggttgagctgcaactgcttcggagcctgggcttcaaccacataaatcagttccaccaacagcgtacctaccggcaacgctttgttttttaacagactaatcgtgctgctaccggtatcgccagaaaggatcagatccagaccgttgcggatcagcggatgctcccaggtaataaactgtgcatcttcacgcgccagcgccacttcacgatcaaaggtgatggtgatgccatcttcgctcaggccagggaagtccggcaccagcatatgatcggacggcgtcagcacgatcatgttgtcgccgcgatcgtcctgattgataccgataatatcgaacaggttcatggcgaaggcgatcaggttggtatcgtcatcctgctcttcaatgctttctgccagtgcctgggctttttcgccaccgttggagtggatttccagcaggcggtcacgaccctgttccagctgtgctttcagcgcttcatgttgctcgcggcagtttttgatcagatcgtcaaagccttcggtttgatccggactagccagatagttaatcagatcgttgtatacgctatcgtaaatagtgcgtccggtcgggcaggtgtgctcaaatgcatccagaccttcgtgataccagcgcaccagcacgctctgagcggttttctccagataaggcacatggatctgaatatcgtgcgcctggccgatacgatccagacgaccaatacgctgctccagtagatccgggttgaatggcaggtcaaacatcaccatgtggctggcgaactggaagttacgtccttcagaaccgatttcactgcacagcagtacctgtgcgccggtgtcttcttcggcaaaccaggcggcagcgcggtcacgttcgataatgctcataccttcgtggaacaccgcagcgcgaataccttcacgttcgcgcagtacctgctccagttgcagcgcagtggcagctttggcgcagatcaccagcactttctgagagcgatggctggtcaggtagcccatcagccactcaacgcgcggatcgaagttccaccaggtggcgttatcaccttcaaattcctgataaatacgctccgggtagagcatatcgcgagcacgatcttccgcacttttacgtgcgcccataatgccggagactttaatagccgtctgatactgcgtcggtagcggcagcttaatggtgtgcagctcgcgtttcgggaatcctttcacaccgttacgcgtgttacggaacagcacgcggctggtgccgtggcgatccatcagcatgctaaccagctcctgacgggcgctctgggcatcttcgctgtcgctgtttgctgcctgcaacagcggctcgatatcctgctcgccgatcatctcgccgagcatgttcagttcgtcattgctcagtttgttacctgccagcagcatggcaacggcgtccgcaaccggacgataatttttctgctcttcaacgaactgcgcaaaatcgtggaaacggttcgggtccagcagacgcagacgggcgaagtggctttccatccccagctgttccggggtcgcggtcagcagcagaacgcccggcacgtgctctgccagttgttcaatggcctgatattcacggcttggcgcatcttcgctccacaccaggtgatgcgcttcatcgaccaccagcaggtcccattcggcttcacagagatgttccaggcgctgtttgctacgacgggcaaaatccaggctgcaaatcaccagctgttcggtgtcaaacgggttgtaagcatcgtgctgagcttcggcataacgctcatcatcaaatagcgcaaagcgcaggttgaaacggcgcagcatttctaccagccactgatgctgtaaggtttccgggacgataattagcacacgttcagcagcgccagagagcagttgctgatgcaggatcatcccggcttcaatggttttccctaaacccacttcgtcagccagcaggacgcgcggcgcgtggcggcgaccaacatcatgagcgatgttgagctgatgcgggatcaggctggtacgctgaccgcgcaggccgctgtacggcatacggaactgttcgctggaatatttacgcgcgcgataacgcagcgcaaagcggtccatacggtcaatctgcccggcaaacagacggtcctgcggtttgctgaacaccagtttgctatcaaggaaaacttcacgcagggctacgccggactcttcagtatccaggcgagtaccgatataggtcagcaagccattttcttcttttacttcttcgacttgcatctgccagccgtcatggctggtaatggtatcaccagggttgaacatcacgcgggtcacgggggaatcactgcgtgcgtacagacggttttcaccagtagatgggaaaagtaaagtgacagttcgcgcatccaccgcgacaacggttccaagtcccaattcgctttctgtatcgctgatccagcgttgaccaagtgtaaaaggcatatgtgttcggctctatatctttaattgcaggcaataaccacccgctaccgtgcttatgaggtagtggtgttattcaggtccaggaatggaaagggcgctatggtactggatggcaaagcattcgtcacgcatcaaaatggtatctggcgaactcttttttttgctcaaaatagcccaagttgcccggtcataagtgtagcaaaattatcctcaataaaagggagtattccctccgccacgggttgtagctggcgggtcagatagtgttcgtaatccagtggactacgttggtagtccagcggctccgggccgttggtggtccatacgtacttaatggtgccgcgattctgatattgcaaggggcgaccacgcttttggttttcttcatcggcaaggcgagcggcgcgtacatgaggcggcacattacgctgatactcgctcagcggacggcgaaggcgtttacggtaaaccagtcgcgcatccagttcacccgccatcagtttgtcgatggtttcgcgtacatattcctgatatggctcgttgcggaagatgcgcaggtatagctcctgctgaaactgctgggccagcggcgtccagtcggtgcgcacggtttccagccctttaaacaccatccgctgcttgtcgccctcctgaatcagtccggcataacgctttttactgccggtatcggctccgcgaatggttggcatcagaaaacggcagaaatgggtttcatactccagttctaatgcgctggtcagccgttgtttttgcagcgtttccgcccaccaggcgttaacgtgctgcaccagtgcacgaccgattttcgccgcttcttcttcgctatgtgcgcctttcagccagacaaacgtactgtcggtatcgccgtagataacgtcgtagccctgtgcttcaatcaacgctttggtttgccgcatgatctgatgaccacgcatggtgatgctgcttgccagccgcggatcgaagaagcggcaggcggtggtgccgagcacgccataaaaggcattcatgatgattttcagcgcctggctcagcggtttgttaccctggcgtttggcttcatcgcgcccgtgccagatgttagtcacaatctccggcaggcaatgtttttctcggctgaaccaggcatcgagaaaaccttcggtactgtgctctggatcaggctgcgccatgccttccaccagcccgacgggatcaatcagaaaggtgcggatgatgctcgggtacaggcttttatagtccagcaccagcacactatcataaagccctggccgactatccatcacgtagccgccagggctggcgtgcggcggcacttcgccgagattaggcgcgacataaccagcgcgatgcattcgcggaaaatagagatgaccaaatgccgccacgctaccgccgtgtcggtccaccggcaggccgttcaccgttgcccgttcgagtaaaaatggcatgatttcagttttgtggaagatctgcgtcaccagctcgcaatctttcaggttataagttgccagcgcaggtttatcttcggcgaaacggcggtcaatttcgtccattcgatcccacgggttatcgatagattttccttcgcctaatagctcctgagcgacagtttccaggctgaaactagagaaattccagaacgcggatttcagcgcctcgataccgtcgataattagccgacctttagcctgggcaaaaaagacgccgtttttaaagccgtgctcgcgccactccagctcgctattatcgcgcccaagacgcagcggaagacggtaacgctcggcatgtttttgcagcattcgcagatcgaactgcaccacgttccaaccgatgatcacatcaggatcgtagttggcaaaccaggcgttgagtttttccagcaactgcgggcggctggcgacgtattccagttcgaaatcaaggctggaggcgtcgccattctccggccccagcatataaacgatgcgctgcccgcagccttccaggccgatgcagtacagctcaccgtggcgggtggtttcaatatctatagaaacccacttgagcggcggacgatagtcgggatgcggtttcagacgggcattaacgatagtgccattgtgcatatcaccctcgacccacaccggactggtgataaaccgctccatcagatagcgttctggcggacgcacatcggcctcgtagacggtaacgccaccttcacgcaggcgcttttcgtaattcatcaattggcgatgggcgcgacagtaaaggccatacaccggctggcggtgaaaatcctttaacgccagcggtgtcaggcgaaagccttgttcaccctgcaaaatatgctgagcgcggggaacctgatcggcgggaataaacgccacggactcttgcggtgcaagcgtaacctgcaacggcccgttgtccgtcgccagccagaaggagacttctgtcccttgcggggtgtcccgccagtgtcgggttaagataaaacctgcctgcgccacgctgaaaatccatcaaaaaaccaggcttgagtatagcctggtttcgtttgattggctgtggttttatacagtcattactgcccgtaatatgccttcgcgccatgcttacgcagatagtgtttatccagcagcgtttgctgcatatccggtaactgcggcgctaactgacggcagaatatccccatataagcgacctcttccagcacgatggcgttatgcaccgcatcttcggcatttttgccccatgcaaacgggccgtgggaatggaccagaacgccgggcatttgcgctgcatcgataccctgtttttcaaaggtttctacgatgacgttaccggtttcccactcatattcgccgttgatttctgcgtcggtcattttgcgggtgcagggaatggtgccgtagaaatagtcggcgtgggtggtgccggttgctggaatgctctgacccgcctgcgcccagatggtggcgtggcggctgtgcgtatgcacaatgccgccaatggaggggaatgcctgatagagcagccggtgagttggcgtgtcggaggagggctttttcgtaccttcaaccacttcaccggtttcgatgctaaccacgaccatatcgtcagcggtcatgacgctgtaatcgacgccggaaggtttgatcacaaagacgccgcgctcgcgatcaacggcgctgacgttgccccatgtgagcgtgaccaggttgtgttttggcagcgccaggttggcttctaatacctggcgtttgagatcttctaacatgttgactccttcgtgccggatgcgctttgcttatccggcctacaaaatcgcagcgtgtaggcctgataagacgcgccagcgtcgcatcaggcgttgaatgccggatgcgctttgcttatccggcctacaaaatcgcagcgcgtaggcctgataagacgcgccagcgtcgcatcaggcgttgaatgccggatgcgctttgcttatccggcctacaaaatcgcagcgtgtaggccagataagacgcgtcagcgtcgcatcaggcgttacataccggatgcggctacttagcgacgaaacccgtaatacacttcgttccagcgcagcgcgtctttaaacgctggcaggcgtgtgtcgttatcaatcaccgtgatttcaatgtcgtgcatctcggcgaattggcgcatatcgttgaggttcagtgcatggctgaagacggtatggtgcgcgccaccagcgaggatccacgcttcggaagcagttggcagatccggttgcgctttccacagcgcattcgccaccggcagtttcggcagggagtgcggtgttttcaccgtgtcgatgcagttaaccagtagacggtaacgatcgccgagatcaatcaagctggcgacaatcgctgggccggtttgggtattgaagatcaggcgggcaggatcgtccttaccaccaataccgagatgctgaacgtcgaggatcggtttctcttctgcggcgatgctcgggcagacttccagcatatgggagccgagcaccaggtcattacctttctcgaagtgataggtgtagtcctccataaaggaggtgccgccctgcagaccggtactcatcaccttcatgatgcgaagcagggcggcagttttccagtcgccttcgcccgcaaagccgtaaccctgctgcatcagacgctgtacggccagaccaggaagctgtttcagaccgtgcaaatcttcaaaggtggtggtgaacgcgtggaagccaccttgttccaggaaacgcttcatccccagctcaatacgcgccgcttccagcacgttctgtcgttttttgccgtggatttgtgtggcaggcgtcatggtgtagcagctttcgtactcatcgaccagcgcgttaacatcgccgtcgctgatggagttcaccacctgcaccagatcgccaaccgcccaggtattgacggagaaaccgaacttgatctgtgcggcaactttatcgccatcggtgaccgccacttcacgcatgttatcgccaaatcggcagactttcagatgacgggtatcctgtttagagaccgcctgacgcatccaggagccgatacgctcatgggcttgtttatcctgccagtgaccggtaaccacggcatgttgctgacgcatacgcgcgccaatgaagccgaactcgcgaccgccatgtgcagtctggttcaggttcataaagtccatatcgatactgtcccacggcagcgccgcgttgaactgggtgtggaattgcagcaacggtttgttgagcatggtcaggccgttgatccacattttggccggggagaaggtgtgcagccacaccaccagaccagcgcaacgatcgtcgtaattcgcgtcgcggcaaatagcggtgatttcatccggcgtggtgcccagcggtttcaacaccagtttgcagggcagtttcgcttccgtattcagcgcattaacgacgtgctcggcatgttgggtgacctgacgcagggtttccgggccatacagatgctggctgccaatgacaaaccacacttcataattatcaaaaatcgtcattatcgtgtccttatagagtcgcaacggcctgggcagcctgtgccggggcggaagttggaagatagtgttgttcggcgctcatcgcccattgctgatagcggcgataaagctgttcaaagcgttgtgcctgctcgctgcacggttgcagggttttctctaccgcactggccattttttgctgagcacttgggatgtctgcgtgcactttcgcggcgacggcagcaaaaatcgccgcaccgagcgcacagcactggtcagaggcaacaatttgcagcgggcgattcagcacgtcgcagcaggcctgcataatgacctggtttttccgcgcgatgccgcccagtgccatcacgttattaacggcgatcccctgatcggtaaagcactccatgattgcgcgtgcgccaaaggcggtggcagcaatcaaaccgccgaacagcagcggagcgtcggtagcgaggttaagatcggtaatcacccctttcaggcgttggttagcgttcggtgtgcggcggccgttaaaccagtcgagcaccaccggcaggtgatccagagacggatttttggcccatgcttcggtcagcgccggaagcagttgtttctggctggcgttgatttgcgttttcagttccggatgctgggcggcaagctgttccagcggccagccgagtacgcgaccaaaccaggcgtagatatcaccaaacgcgctttggcctgcttccagaccgataaatccaggcaccacgctgccatcaacctgaccgcaaatacctttaactgcccgctcgccaacgctctgtttgtcggcaatcagaatgtcgcaggtggaagtaccgataacttttaccagtgcgttaggctgtgcgcctgcgccaactgcgcccatatggcagtcaaacgcgccgccggaaatcaccacgctttcaggcaggccgagacgctgcgcccattccgggcataaggtgcccaccggaatatcggcagtccaagtgtcagtgaacagcggggaaggcaaatggcgattgaggatcgggtccagctcatcaaagaaactggctggcggcaggccgccccagctttcgtgccacagagatttatgcccggcgctgcaacgtccgcgacgaatatcctgcgggcgggtggtaccggaaagcagagctggcacccagtcgcacagctcaatccagcttgcggcagattgcgccacggcgctgtcctggcgagtcacatgcaggatttttgcccagaaccattcgctggaataaataccaccaatgtagcgggagtagtcaacgttgcccggcgcgtggcacaaacgggtaatctcttccgcttcttcaaccgcagtgtggtctttccacaatacgaacatcgcgttcgggttttcggcaaactccgggcgcagcgccagcacgtttccgtcggcatcaatcggtgcgggcgtgctgccggtactgtcaacgccaatcccgaccacagctgcgcgctgttcgacgctaagctctgcaagcacggttttcagtgccgcttccatactctcaatgtagtcacgcggatgatgacggaactggttattcggggcatcacaaaattgccctttctgccaacggggataccactctacgctggtggcgatctcttcaccggtagcgcagtccaccgccaaagctcgcacagaatcactgccaaaatcgaggccaattgcaatcgccatcgtttcactccatccaaaaaaacgggtatggagaaacagtagagagttgcgataaaaagcgtcaggtaggatccgctaatcttatggataaaaatgctatggcatagcaaagtgtgacgccgtgcaaataatcaatgtggacttttctgccgtgattatagacacttttgttacgcgtttttgtcatggctttggtcccgctttgttacagaatgcttttaataagcggggttaccggttgggttagcgagaagagccagtaaaagacgcagtgacggcaatgtctgatgcaatatggacaattggtttcttctctgaatggtgggagtatgaaaagtatggctgaagcgcaaaatgatcccctgctgccgggatacagctttaacgcccatctggtggcgggtttaacgccgattgaggccaacggttatctcgatttttttatcgaccgaccgctgggaatgaaaggttatattctcaatctcaccattcgcggtcagggggtggtgaaaaatcagggacgagaatttgtctgccgaccgggtgatattttgctgttcccgccaggagagattcatcactacggtcgtcatccggaggctcgcgaatggtatcaccagtgggtttactttcgtccgcgcgcctactggcatgaatggcttaactggccgagtatatttgccaatacgggtttctttcgcccggatgaagcgcaccagccgcatttcagcgacctgtttgggcaaatcattaacgccgggcaaggggaagggcgctatagcgagctgctggcgataaatctgcttgagcaattgttactgcggcgcatggaagcgattaacgagagcctccatccaccgatggataatcgggtacgcgaggcttgtcagtacatcagcgatcacctggcagacagcaattttgatatcgccagcgtcgcacagcatgtttgcttgagcccgagccgtctgagtcatcttttccgccagcagttagggattagcgtcttaagctggcgcgaggaccaacgcattagtcaggcgaagctgcttttgagcactacccggatgcctatcgccaccgtcggtcgcaatgttggttttgacgatcaactctatttcagccgagtatttaaaaaatgcaccggggccagcccgagcgagtttcgtgccggttgtgaagaaaaagtgaatgatgtagccgtcaagttgagttaattggtaacgaatcagacaattgacggcttgacggagtagcatagggtttgcagaatccctgcttcgtccatttgacaggcacattatgcaagcattgctggaacactttattacccaatccaccgtgtatagtttgatggcggtggtgttggtggcctttctggagagcctggcgctggtcggtttgattctacccggtacggtgctgatggcggggctgggagcgctgattggcagcggcgagttaagtttctggcacgcctggctggcagggattattggctgcttgatgggcgactggatttctttctggctgggttggcgttttaaaaagccgttgcatcgctggagttttctgaagaaaaacaaagcactacttgataaaactgaacatgcgttgcatcaacacagcatgttcaccattctggtcggtcgttttgttggcccgacgcgtccgctggtgccaatggtggcgggaatgctggatctgccggtggctaaatttattacgccgaatattatcggctgcctgctgtggccgccgttttacttcctgccagggattctggcgggcgcggcgatcgatattcctgccggaatgcagagcggtgagtttaaatggttgctgctggcaacagcggtgtttttgtgggttggtggctggctgtgctggcggttatggcgcagcggtaaagcgactgaccgtttgagtcattatttgtcccgcggtcgtttgttgtggctgacgccgttgatttctgccatcggcgtggtggcgctggtggtgttaattcgccacccgttgatgccggtgtatatcgatattttgcgtaaagtggttggggtttaagagatagtcttgtgcgggttgcctgatgcgacgcttgccgcgtcttatcaggcctacaaaacgcactacccgtaggtcggataaggcgttcacgccgcatccgacagtgcatattaacccgtaatccccaatagtgcgctagcactcgccttaccgctcaacaactcattggtcataccctgccaggcgatgcgcccgtcggcgactactacgctgcgcgtggcgatccgcgccgcatcttccacgctgtggctcaccatcaatagcgtcattttttgctgctggcagctcgtgctcaccagcgtcaacatctcctgacgtaacgccggatcgagcgcagagaacggttcatcgagcaataaaatcggctgttcgcgtaccagacaacgcgctaacgccactcgctgtcgctgaccgccggaaagctcgcccggtaaccgcgccattaaattatcaatccccatctggcgggcgatagcgtgcattttcccctgctgtaccgcgttcagtttcaatcccggatttagccccagcccgatgttctgtgcgaccgtcaggtggctgaacaggttgttctcctgaaacagcatgctcaccggacggcgactcggcggcatagttgtgtgatctacgccatcgatagtcaggctaccgctggctggcgtcagaaaaccggcgatcaaattcagcagggtacttttacccgcgccgcttggcccgaggatcgccacctgctcgccgcgttccaccgttaagctaaaacgcatcggcaaatggtggtaaagccaggtgatatcagtcagttttaacatttcgccccggtagtttttcaatcacggtaaacagcagaaaacagagcagcagcagaattaacgcggtgaccgcaccgtcctggctgcgataggagccaatttgctggtagagataaaacggcagggtgcggaaatcatcgttaccgaacaacgccaccacgccaaaatcaccaatgctcagcacgcatgcaaaggccagcgcctgcgccagtggacgtttcagggcgcgcagctccaccacttttaagcgactccagccttcaatccccaggctctgacataacatgctgtagcgggcggtgatatcgcgcatcgggttttccagcactttcagcgcataagggatcgccattaacgcattggtgaaaatcacaatgccgtcagcagattgtggcaggccgatagtgttgttgagcagtaaaaagaagccggtagccagcacaatccccggcatggcgaggatcaacatgccgctcatctccagcacctgacccgccagcattttctgccgcgcccgcagttcgcgactgctccatagcagcatcatggtcagcactacgcacaatacacctgccgccagcgcaatacgcaagctggtccacagcgcctgccacagcaccggttgtgccagcacttccggcaactggcgatttaccccatcgacgatcaccgccagtaacggtggcagcaacagcagcagcgccagcacaattaacaccgtgtcgcaaatgcggctatgcagacgatcgtccgggtcgcgccagccttgcagcagcgtggtgccgggcgcaatggccttactcaatcgctgactcaacagcaccagcccgaggcagcacaccatctggagcagcgccagcattgccgcgcgggcaggatcgtagtcgtaactcagcgcctgatagattgccagctcgatagtggtcgcctgcggaccgccccccaggcttagcacggtggcgaagctggcgaaacagagcataaagataagcgcagcaaccggcgggatttgtcgccgtaaccacggccattcgacgaagcggaaaaaatgccagctacgcatcccaagctgggcggcaagttgacgctgttcgccggggatgttttccagtgcctggagtaataagcggctcgccatcggcagattaaaaaacacatgggccagcaaaataccttgcaggccgtaggggctaaaggtccactccagaccgaggctttggcagagtgttgccagccagccctggcgaccatagacgctaagaatgccgaaaacagcgaccaacaccgggaggatcaaggtcattgcacacagacgcaacagcgccagccgacccggaaagcgcctgcgatagagcgcgcgggcgaggaatatcgcgggtatgacagagagcagtgcgctgagaaacgcctgccagaaggagaagcgcaccacatgccacagatagctgtcctgccagactgccacccagtcatcctgcggcgcgttccaccacagggcgagaaacgccgccagcgcaaccgctaccaccagcgtggtggcgcttacacctggaattaaccagccgggaattaacggctgacggcgcgttgccattcgctaatccatgcctgacgttgtgccgccacttcggctggcgtgaactccaacgtggttgcgggtttggtcaatttttcaaaaccggcaggcagcgtgacgtttgccaccggatacatccagttgccggttgggatcgcattctggaaagccggagaaaccataaactggaggaatttttgcgccagctccggctgcttgctggcagcggtgcgggcggcgacttccacttgcagatagtgaccttcgctgaagttcgcggcggcgtagttatctttcttctcttcgagaatgtgataagccggagaggtggtgtaactcagtaccagatcgctttcaccttttaaaaacaggccgtaggcttcgctccagcctttggtgaccgtgaccgttttcttcgccagtttctgccaggcttgtggggcgtcatcgccatagactttttgcatccatagcaacagacccagccccggtgtactggtgcgcggatcctgataaatcacccgccagttttgatcgctctcaaccagttctttcaggctttgtggcgggtttttcagtttgttcttgtcataaacgaaggcgaagtagccataatcaaacggtacgaaagtgtcattattccagccgccgggaacgttaacggcatccgctgccacaccgcttttggcaaacagtccggttttactggcggcgtctaacaggttgttatccagccccagcaccacatcggctttactgtttttgccttccatccgtagacggttgagaaggctaacgccatcttccagcgccaccagtttcagttcgcaattacagtcggcttcaaaggcttttttaaccaccggaccaggcccccagtcggcggcgaaggaatcgtaggtataaacagtcagaacgggtttagcgaaaacgggcgctgtgcacagcaacagcaggggcagacatttttttaacactttgcacctcaaaaaagagtggcaaaggacttgagaaggagcctcaaatcccttcgccggcgttatccggatcaggttcgacgggtattttctcagcgcacgcgtacgcgtggcaccccgttgagaacggcgttagtgtagtgattttgttatcaaccagcaatcatggatccggtggcgcaaaccacgcacttttaaaatcgaaccagccgagggtattcatgcgcaggccgcgcatactgcgttgcccctgaatgatcagccagtggtgcaataatggcaccatcgctttgctggcgaccagttgctggcaccagttcgccagattcatctcgccattgcgccagcgagcagcgtcggcttgccagtcaatgggaatgcaatgttgtagcagtggcacttcgcataaatgtgcgaaaacagagaagtccagcggcagggtaaagttggcgctgtttagccagatatcactttcgatctctcctgtatgccactgatcgtagtcgatctctttgattttcagcgtgacctggtgacttgccagaatctgctgcatgatcccggcaatcacccgatgctcactgtgatcctgataaaaggttagggtgaggctttccaggccagccggtttttcgctctttatggtgcgggcatggtgccaacgggggagcagtccataagccgggaaccacagttgctggtactgttcctcagcgaaatagaccagattagttggagaaagcacatagcttacccagtccctgacttgctgattcgccccgcgatgggtgcggctgtcgaacagtaaatagtagcaaccttcctccaggcggctttcaatctctttttcctcgccctgtggaccttttagcatcagccctccggctggctcgtcggcaatttccggcagaacccagacgttaacttcgtcgattaatgcccggtaaccgaagaagtcatcgaatgcctgaattttcagttgattggtgctgttgcgaatcaccgcatacggaccggtgccgatgggatggctggcaaagttactgagggtttcccattcgcgcggcaggatcatcgccggaacttgccccagcagtaacggtaaccagcggtccggttgcgtgagatggatatccagcgtccagggcgtcgggctcacaatgtcagcaatatggctatagagcggcagcgtattgattcgttttaaagaggcgatcacatcgtccatttccagttcacgaccatggtgaaaatggactcctggacgcaaaaagaaacgccagtgaagcggactaatttgctgccagtggtgggcgatgtctgcttccagttccccattttcctcatttatgcgcgttaggctactgaagatttgccgggcgatatgggtttcggaacggcgcaatgcgctgccaggtagcagattacgcaacggacgatagtagagcacgcgcaggatgtgccgcccctggcggaagctgcggcccagatgagaaaccagcatttgccgcacagtcgctttgtcgccaaccaactgcaccagttgatcgatacgatcctgctccagcaggtcttccgcccgctgttgctgaagcgccagcccggtatagaggaatgtcagacggctgcgtttaccgcgcccgacttccgcttcccacgtcagccagccgcgatcctgcatggtgttgagcagggtgcgcatatgacgacggctgcagctcaataacgctgccagttcgttgagcgttgtgtcctggcttttaccctcgcagcattgccacaggcggatgaactgttgttgcagacgagcagatggcataaaaggggaactcctgtgcaaaagacagcaattttattttccctatattaagtcaataattcctaacgatgaagcaagggggtgccccatgcgtcagttttatcagcactattttaccgcgacagcgaagttgtgctggttgcgttggttaagcgtcccacaacgattaaccatgcttgaaggactgatgcagtgggatgaccgcaattctgaaagttgacttgcctgcatcatgtgtgactgagtattggtgtaaaatcacccgccagcagattatacctgctggttttttttattctcgccgcgctaaaaagggaacgtatgatctggataatgacgatggctcgccgtatgaacggtgtttacgcggcatttatgctggtcgcttttatgatgggggtggccggggcgctacaggctcctacattgagcttatttctgagtcgtgaggttggcgcgcaacctttctggatcggcctcttttatacggtgaatgctattgctgggatcggcgtaagcctctggttggcaaaacgttctgacagtcagggcgatcggcgaaaactgattatattttgctgtttgatggctatcggcaatgcgctattgtttgcatttaatcgtcattatctgacgcttatcacctgtggtgtgcttctggcatctctggccaatacggcaatgccacagttatttgctctggcgcgggaatatgcggataacagcgcgcgagaagtggtgatgtttagcagcgtgatgcgtgcgcagctttctctggcatgggttatcggtccaccgttggcctttatgctggcgttgaattacggctttacggtgatgtttagcattgccgccgggatattcacactcagtctggtattgattgcatttatgcttccgtctgtggcgcgggtagaactgccgagcgaaaatgctttaagtatgcaaggtggctggcaggatagtaacgtacggatgttatttgtcgccagcacgttaatgtggacctgcaacaccatgtacattattgatatgccgttgtggatcagtagcgagttaggattgccagacaaactggcgggtttcctgatggggacggcagctggactggaaataccagcaatgattctggctggctactatgtcaaacgttatggtaagcggcgaatgatggtcatagcagtggcggcaggagtactgttttacaccggattgattttctttaatagccgtatggcgttgatgacgctgcaactttttaacgctgtatttatcggcattgttgcgggtattgggatgctatggtttcaggatttaatgcctggaagagcgggggcagctaccaccttatttactaacagtatttctaccggggtaattctggctggcgttattcagggagcaattgcacaaagttgggggcactttgctgtctactgggtaattgcggttatttctgttgtcgcattatttttaaccgcaaaggttaaagacgtttgatgacgtggacgatagcggaaagcccggtcatttgaccgggcaaggggattaattcataaacgcaggttgttttgcttcataagcggcaatggcgtcgtcgtgctgcaaggtaagcccaatactgtccagaccgttcatcatgcagtggcggcggaaggcatcgatggtaaagcgataggttttctctcccgctttcacctcttgcgcttccagatccacgtcgaaatggatccccggattagctttcaccagcgcaaacagttcgtccacttctgcatcgcttaatttcaccggcagcagctggttgttaaagctattgccgtagaagatgtcagcaaaactcggcgcaatcaccactttaaaaccgtagtcggtcaatgcccagggcgcgtgctcacggctagagccacagccgaagttttctcgtgccagcaaaatggaagcgccctgatactgcgggaagttcagcacgaagtccgggtttggctgttggcctttttcatccagaaaacgccagtcgttaaacagatgcgcgccaaaacccgtacgggtcactttctgcaaaaactgtttcgggatgattgcatcggtatcgacattggcggcatccagcggaaccaccaggcctgtgtgtttgataaatttctctgccatggtgtgctccttatttaatgttgcgaatgtcggcgaaatgtccggtcacagcagcagcggcagccattgccgggctgaccagatgcgtgcgcccgccgcgcccctggcggccttcaaagttacggttgctggtggaggcacaacgttcgcccggattcagacggtcgttgttcatcgccagacacatactgcagccaggcaagcgccattcaaaaccggcttcaataaagattttatccagaccttccgcttccgcctgggcttttaccgggccagagccgggaaccaccagtgcctgcacgcctggcgcgacttttcgccctttggcgatctccgctgccgcgcgtaaatcttcaatgcggctgttggtacaggaaccgataaacactttgtcgatagccacttcggtcagcggaatacccggtttcagccccatataggccagcgctttttctgcgctcgcgcgttcaaccggatcggcaaagctagccggatcgggaatattgtcgttcacggaaatcacctggccgggattggtgccccaggtgacctgcggactaatttcttctgcttgcagagtgacaacggtatcgaaagttgcgccttcgtcggtttgcagggttttccagtaggcaacggcgtcgtcgaaatctttgcctttcggcgcatgcagacggcctttgacatagttaaaggtggtttcgtccggtgcaaccagaccggcttttgcgcccatttcgattgccatattgcacagggtcatacgaccttccatgcttaaatcacggattgcttcgccgcaaaactccaccacatgcccggtgccgcctgcgctaccggttttaccgataattgccagcacgatatcttttgcggtaatgcccggcgcggctttgccctggacttcaattttcatggtttttgcgcggccctgtttcagggtttgcgttgccagtacgtgttcaacttcggaagtgccgataccaaaggccagtgcgccaaacgcgccgtgggtggcggtatggctgtcgccgcagacaatggtcatccccggcaaggtgacgccctgttccggccccattacgtggacgatcccctgatacgggtgattcaggtcatacagttcgacgccaaattctttgcagtttttgatcagttcctgcatctggatacgcgccatttcaccgcaggcattaatgtctttggtctgggtagagacgttgtgatccatggtagcgaaggttttgcccggctgacgtaccgggcgaccgtgggcgcgcagaccatcgaacgcctgcggactggtcacttcatgcaccaggtggcggtcgatatataacagtggggtttcgttttcggcttcgtacacaacgtgagcgtcgaacaatttttcgtataacgtcttagccatgattacaccccttctgctacatagcgggcaatgatatcgcccatttcatcggtactaacggcggcagcgccacgggctaaatccccggtgcgaatgccttcttctaatgcgcggttaatggcgcgttcaatggcgcaagccgcatcatcggcatccaggctgtaacgcagcagcagtgccaggctaaggatttgtgcaatcgggttggcgatgtttttgcctgcgatatctggtgcgctgccgcccgccggttcatacagtccaaaaccttgctcgttcaggctggcggaaggcaacatccccatgctgccagtgatcattgcgcactcgtcagacagaatgtcgccaaacaggttggagcacagcagaacgtcaaactgacttggatctttaatcagctgcatggtggcgttgtcgatgtacatatgcgccagttcgacatccgggtattccgtggcgatctcgttaacgatctcccgccataaaatagaggattgcagcacgttggctttatcgatgctcgtcactttgtggcgacgcttgcgagcagattcaaacgcgatgcgggcgatacgttcgatctcaaaacggtgatacacctcggtatcaaaggctttttcatattgtccgctaccttcgcggccttttggctgaccgaaatagatgccgccggtcagttcgcgcacacacaggatgtcgaagccgtttgcggcaatgtctgcacgcagcggacagaatgcttccagcccctgatacagttttgccgggcgcaggttgctgaataatttgaagtgcttacgcagaggcagcagcgcgccgcgttctggttgctggtctggtggtaaatgttcccacttcgggccgcctacgctgccaaacagcacggcatcggcttgctcacaaccttcaaccgtcgcaggcggcagtggttgcccgtggttatcaatggctgcgccgcctacatcgtaatggctggtggtgatgcgcatcgcaaagcggttgcgcacggcatccagcactttcagcgcctgggtcatcacttccggaccaataccgtcccccggcaatacggcaatatggtaattcttgctcatcacacggtttccttgttgttttcgttgtgttgagctttgcgttgcaactctttttcgacttctgcggcacgccagatattgttcagaacgtgcaccatggctttggcagaactctcgacaatatcggtagccaggccgacgccgtggaagcggcgaccgttgtagttagcgacgatatccacctgacccagcgcatctttaccgtggcctttggcggtcaggctgtatttcaccagttcgacgttatattcagtgatgcggttaattgcctgatagacggcatcgaccggaccgttaccgttggcggcttctgctttgacttcttcgccacaggccagtttgacggcggcggtggcgatatcgttagagccagactgcacgctgaagtaatccagacggaaatgctccggctcttcttgctgcttaccgatgaaggccagcgcctccagatcgtaatcaaacacctgaccttttttgtccgccagcttcaggaaagcatcgtacaaattgtctaaattatattcactttctttataccccatctcatccatgcgatgtttcaccgccgcacgcccgctacgagaggtcagattcagctggatttggttcagaccaatagattctggtgtcatgatttcgtagttttcgcggtttttcagcacgccatcctggtgtataccggaggagtgtgcgaatgcgccgctgccaacaatggctttgtttgccgggatcggcatattacaaatctggctaactaactggctggtgcgccatatctcctggtgattaatggcggtgtggacgttgagaatatccttacgaactttgatcgccatgatgacttcttccagggaacagtttccggcacgctcgccgatcccgttcattgcgccttccacctggcgtgcaccggcatgtaccgccgccagactgtttccgaccgccaggcccaaatcgtcgtgggtatgtacggagataatggctttgtcgatgttaggcacgcgttcatacaggccgctgatgattccggcgaactcaaacggcatggtgtagcccacggtgtccggaatgttgatggtggtggcaccggcattaatcgccgcttcgaccactcgcgccagatcggcaatgggtgtacgcccggcatcttcgcaagaaaattcaacatcatcggtgtaattacgggcgcgtttcaccatatagatagcgcgttcgatcacctcgtccagcgtgctgcgcagcttggtggcgatgtgcattgggctagtggcaataaaggtatgaatacggaaggcttcggcgactttcagggattcggccgccacgtcgatatctttttccacgcagcgagctaacgcacatacgcggctgtttttaacctggcgggcgatggtttgcacgctttcaaaatcgcccgggctagagacggggaaaccgacttccatcacgtcaacacccatacgctcaagggccagcgcaatttgcagtttttctttcacactcaagcttgcctgtaacgcctgttcaccgtcgcgcaatgtggtatcgaaaataatgacttgctggctcatggtttgggtccttgtctcttttagagcgcctcgcttcgggcataaaaaaacccgcgcaatggcgcgggttttttgtttgactgcgtgctggcttaatgctggatgccgctcactcgtctaccgcgcaaagaagatgcgtttagtagtagtagaccgataaagcgaacgatgtgagtcattaaatcagctccagatgaatgcgatatgcttttagagttactggatacaaaaacggatgtcaaccctgacgcaataaaaacgtcccgccagcgtgagttctgcatccgtaaaattagctaattgtgctgcggtggttaaagtaagcgatattaatttctgcttaactaccgacgcttttcatcggttgacatatttcagcataaatttttgcatctaatcaacgaggaaaaaggggacaaaatgcacgcgttgcaaaacctatcctgatgatttgtattgaattatatgttttgcgattttttttgatattgatttggtgaatattattgatcaattaatgttaagaattaatgcattaaatatataaattaattattaaataagcacatttaatccattttgtagatgattgagtattcgcggtagttatgattagattgttttcgcaacaaaaacattatggattattatgctgtggtaaatgactcattccacggcaatggattctgtttttatcagaacccgtatctttatgttttccgaattttactcattttgctttttcttattttatatgcatgataaatcatattcttcaggattatttctctgcattccaataagggaaagggagttaagtgtgacagtggagttaagtatgccagaggtacaaacagatcatccagagacggcggagttaagcaaaccacagctacgcatggtcgatctcaacttattaaccgttttcgatgccgtgatgcaggagcaaaacattactcgtgccgctcatgttctgggaatgagccaacctgcggtcagtaacgctgttgcacgcctgaaggtgatgtttaatgacgagctttttgttcgttatggccgtggtattcaaccgactgctcgcgcatttcaactttttggtagtgttcgtcaggcattgcaactagtacaaaatgaattgcctggtagtggttttgaacccgcgagcagtgaacgtgtatttcatctttgtgtttgcagcccgttagacagcattctgaccagccagatttataatcacattgagcagattgcgccaaatatacatgttatgttcaagtctagtttaaatcagaacactgaacatcagctgcgttatcaggaaacggagtttgtgattagttatgaagacttccatcgtcctgaatttaccagcgtaccattatttaaagatgaaatggtgctggtagccagcaaaaatcatccaacaattaagggcccgttactgaaacatgatgtttataacgaacaacatgcggcggttagcctcgatcgtttcgcgagttttagtcaaccttggtatgacacggtagataagcaagccagtatcgcgtatcagggcatggcaatgatgagcgtacttagcgtggtgagccaaacgcatttggtcgctattgcgccgcgttggctggctgaagagttcgctgaatccttagaattacaggtattaccgctgccgttaaaacaaaacagcagaacctgttatctctcctggcatgaagctgccgggcgcgataaaggccatcagtggatggaagagcaattagtcagtatttgcaaacgctaactgattgcagaataggtcagacatgaatgtctggtttattctgcattttttattgaatgtagaattttattctgaatgtgtgggctctctattttaggattaattaaaaaaatagagaaattgctgtaagttgtgggattcagccgatttattatcaatttaatcctctgtaatggaggattttatcgtttcttttcacctttcctcctgtttattcttattaccccgtgtttatgtctctggctgccaattgcttaagcaagatcggacggttaatgtgttttacacattttttccgtcaaacagtgaggcaggccatggagatgttgtctggagccgagatggtcgtccgaagccttatcgatcagggcgttaaacaagtattcggttatcccggaggcgcagtccttgatatttatgatgcattgcataccgtgggtggtattgatcatgtattagttcgtcatgagcaggcggcggtgcatatggccgatggcctggcgcgcgcgaccggggaagtcggcgtcgtgctggtaacgagcggtccaggggcgaccaatgcgattactggcatcgccaccgcttatatggattccattccattagttgtcctttccgggcaggtagcgaccagcttgataggttacgatgcctttcaggagtgcgacatggtggggattagccgaccggtggttaaacacagttttctggttaagcaaacggaagacattccgcaggtgctgaaaaaggctttctggctggcggcaagtggtcgcccaggaccagtagtcgttgatttaccgaaagatattcttaatccggcgaacaaattaccctatgtctggccggagagcgtcagtatgcgttcttacaatcccactactaccggacataaagggcaaattaagcgtgctctgcaaacgctggtagcggcaaaaaaaccggttgtctacgtaggcggtggggcaatcacggcgggctgccatcagcagttgaaagaaacggtggaggcgttgaatctgcccgttgtttgcagtttgatggggctgggggcgtttccggcaacgcatcgtcaggcactgggcatgctgggaatgcacggtacctacgaagccaatatgacgatgcataacgcggatgtgattttcgccgtcggggtacgatttgatgaccgaacgacgaacaatctggcaaagtactgcccaaatgccactgttctgcatatcgatattgatcctacttccatttctaaaaccgtgactgcggatatcccgattgtgggggatgctcgccaggtcctcgaacaaatgcttgaactcttgagccaagaatccgcccatcaaccactggatgagatccgcgactggtggcagcaaattgaacagtggcgcgctcgtcagtgcctgaaatatgacactcacagtgaaaagattaaaccgcaggcggtgatcgagactctttggcggttgacgaagggagacgcttacgtgacgtccgatgtcgggcagcaccagatgtttgctgcactttattatccattcgacaaaccgcgtcgctggatcaattccggtggcctcggcacgatgggttttggtttacctgcggcactgggcgtcaaaatggcgttgccagaagaaaccgtggtttgcgtcactggcgacggcagtattcagatgaacatccaggaactgtctaccgcgttgcaatacgagttgcccgtactggtggtgaatctcaataaccgctatctggggatggtgaagcagtggcaggacatgatctattccggccgtcatagtcaatcttatatgcaaagcctacccgatttcgtccgtctggcggaagcctatgggcatgtcgggatccagatttctcatccgcatgagctggaaagcaaacttagcgaggcgctggaacaggtgcgcaataatcgcctggtgtttgttgatgttaccgtcgatggcagcgagcacgtctacccgatgcagattcgcgggggcggaatggatgaaatgtggttaagcaaaacggagagaacctgattatgcgccggatattaagtgtcttactcgaaaatgaaagtggcgcgttatcccgcgtgattggccttttttcccagcgtggctacaacattgaaagcctgaccgttgcgccaaccgacgatccgacattaagccgtatgaccatccagaccgtgggcgatgaaaaagtacttgagcagatcgaaaagcaattacacaaactggtcgatgtcttgcgcgtgagtgagttggggcagggcgcgcatgttgagcgggaaatcatgctggtgaaaattcaggccagcggttacgggcgtgacgaagtgaaacgtaatacggaaatattccgtgggcaaattatcgatgtcacacccagcctttataccgttcaattagcaggcaccagcggtaagcttgatgcatttttagcaagcattcgcgatgtggcgaaaattgtggaggttgctcgctctggtgtggtcggacttagccgcggcgataaaataatgcgttgagaatgatctcaatgcgcaatttacagcccaacatgtcacgttgggctttttttgcgaaatcagtgggaacctggaataaaagcagttgccgcagttaattttctgcgcttagatgttaatgaatttaacccataccagtacaatggctatggtttttacattttacgcaaggggcaattgtgaaactggatgaaatcgctcggctggcgggagtgagccggaccactgcaagctatgttattaacggcaaagcgaagcaataccgtgtgagcgacaaaaccgttgaaaaagtcatggctgtggtgcgtgagcacaattaccacccgaacgccgtggcagctgggcttcgtgctggacgcacacgttctattggtcttgtgatccccgatctggagaacaccagctatacccgcatcgctaactatcttgaacgccaggcgcggcaacggggttatcaactgctgattgcctgcagtgaagatcagccagacaacgaaatgcggtgcattgagcaccttttacagcgtcaggttgatgccattattgttagcacgagcttgcctcctgagcatcctttttatcaacgctgggctaacgacccgttcccgattgtcgcgctggaccgcgccctcgatcgtgaacacttcaccagcgtggttggtgccgatcaggatgatgccgaaatgctggcggaagagttacgtaagtttcccgccgagacggtgctttatcttggtgcgctaccggagctttctgtcagcttcctgcgtgaacaaggtttccgtactgcctggaaagatgatccgcgcgaagtgcatttcctgtatgccaacagctatgagcgggaggcggctgcccagttattcgaaaaatggctggaaacgcatccgatgccgcaggcgctgttcacaacgagctttgcgttgttgcaaggagtgatggatgtcacgctgcgtcgcgacggcaaactgccttctgacctggcaattgccacctttggcgataacgaactgctcgacttcttacagtgtccggtgctggcagtggctcaacgtcaccgcgatgtcgcagagcgtgtgctggagattgtcctggcaagcctggacgaaccgcgtaagccaaaacctggtttaacgcgcattaaacgtaatctctatcgccgcggcgtgctcagccgtagctaagccgcgaacaaaaatacgcgccaggtgaatttccctctggcgcgtagagtacgggactggacatcaatatgcttaaagtaaataagactattcctgactattattgataaatgcttttaaacccgcccgttaattaactcaccagctgaaattcacaataattaagtgatatcgacagcgcgtttttgcattattttgttacatgcggcgatgaattgccgatttaacaaacacttttctttgcttttgcgcaaacccgctggcatcaagcgccacacagacgtaacaaggactgttaaccggggaagatatgtcctaaaatgccgctcgcgtcgcaaactgacactttatatttgctgtggaaaatagtgagtcattttaaaacggtgatgacgatgagggattttttcttacagctattcataacgttaatttgcttcgcacgttggacgtaaaataaacaacgctgatattagccgtaaacatcgggttttttacctcggtatgccttgtgactggcttgacaagcttttcctcagctccgtaaactcctttcagtgggaaattgtggggcaaagtgggaataaggggtgaggctggcatgttccggggagcaacgttagtcaatctcgacagcaaagggcgcttaagtgtgcctacccgttatcgggaacagctgcttgagaacgctgccggtcaaatggtttgcaccattgacatttatcacccgtgcctgctgctttaccccctgcctgaatgggaaattatcgagcaaaaattaagccgtctgagcagcatgaacccggttgagcgccgtgtgcagcgcctactgttaggtcatgccagcgaatgtcagatggatggcgcaggtcgattgttaatcgcgccagtactgcggcaacatgccgggctgacaaaagaagtgatgctggttggacagttcaacaagtttgagctgtgggatgaaacaacctggcatcaacaggtcaaggaagatatcgacgcagagcagttggctaccggagacttaagcgagcgactgcaggacttgtctctataaaatgatggaaaactataaacatactacggtgctgctggatgaagccgttaatggcctcaatatccgtcctgatggcatctacattgatgggacttttggtcgcggtggtcacagtcgtctgatcctcagccagcttggcgaagaggggcgtttgctggcgatcgatcgcgacccgcaggctatcgccgttgcgaagactattgatgatccgcgcttctccatcatccacggacctttctccgcgctgggcgaatacgttgccgagcgcgatcttatcggcaagatcgacggcattctcctcgatcttggcgtctctagtccgcaacttgatgatgctgaacgtggcttttcctttatgcgcgatggtccgctggacatgcgtatggacccaacccgtgggcagagtgccgctgaatggctacaaaccgcagaagaagccgatatcgcctgggtattgaaaacctatggtgaagagcgttttgccaaacgcattgcccgcgccattgtcgagcgtaaccgcgaacagccgatgacccgcaccaaagaactggcggaagtcgtggctgctgcaacgccggtgaaagataagtttaaacatcccgcgacccgtaccttccaggcggtgcgcatttgggtaaacagtgaactggaggagatagagcaggcgctaaaaagcagcctcaacgtgctggccccgggtgggcggcttagcatcatcagcttccacagcctggaagaccgtattgtgaaacgttttatgcgtgaaaacagccgcggtccgcaagttccggcagggttaccgatgactgaagagcagctcaaaaaactgggtggccgtcagctgcgagcactaggcaagttaatgccgggcgaagaagaggtggctgagaaccctcgtgcccgtagtagtgttctgcgtattgcagagaggacgaatgcatgatcagcagagtgacagaagctctaagcaaagttaaaggaagcatgggaagccacgagcgccatgcattgcctggtgttatcggtgacgatcttttgcgatttgggaagctgccactctgcctgttcatttgcattattttgacggcggtgactgtggtaaccacggcgcaccatacccgtttactgaccgctcagcgcgaacaactggtgctggagcgagatgctttagacattgaatggcgcaacctgatccttgaagagaatgcgctcggcgaccatagccgggtggaaaggatcgccacggaaaagctgcaaatgcagcatgttgatccgagtcaagaaaatatcgtagtgcaaaaataaggataaacgcgacgcatgaaagcagcggcgaaaacgcagaaaccaaaacgtcaggaagaacatgccaactttatcagttggcgttttgcgttgttatgcggctgtattctcctggcgctggcttttctgctcggacgcgtagcgtggttacaagttatctccccggatatgctggtgaaagagggcgacatgcgttctcttcgcgttcagcaagtttccacctcccgcggcatgattactgaccgttctggtcgcccgttagcggtgagcgtgccggtaaaagcgatttgggctgacccgaaagaagtgcatgacgctggcggtatcagcgtcggtgaccgctggaaggcgctggctaacgcgctcaatattccgctggatcagcttagtgcccgcattaacgccaacccgaaagggcgctttatttatctggcgcgtcaggtgaaccctgacatggcggactacatcaaaaaactgaaactgccggggattcatctgcgtgaagagtctcgccgttactatccgtccggcgaagtgactgctcacctcatcggctttactaacgtcgatagtcaagggattgagggcgttgagaagagtttcgataaatggcttaccgggcagccgggtgagcgcattgtgcgtaaagaccgctatggtcgcgtaattgaagatatttcttctactgacagccaggcagcgcacaacctggcgctgagtattgatgaacgcctgcaggcgctggtttatcgcgaactgaacaacgcggtggcctttaacaaggctgaatctggtagcgccgtgctggtggatgtcaacaccggtgaagtgctggcgatggctaacagcccgagttacaaccctaacaatctgagcggcacgccgaaagaggcgatgcgtaaccgtaccatcaccgacgtgtttgaaccgggcagtacggttaaaccgatggtggtaatgaccgcgttgcaacgtggcgtggtgcgggaaaacagcgtactcaataccattccttatcgaattaacggccacgaaatcaaagacgtggcacgctacagcgaattaaccctgaccggggtattacagaagagcagtaacgtcggtgtttccaagctggcgttagcgatgccgtccagtgcgttagtagatacttacagtcgttttggactgggaaaagcgaccaatttggggttggtcggagaacgcagtggcttatatcctcaaaaacaacggtggtctgacatagagagggccaccttctctttcggctacgggctaatggtaacaccattacagttagcgcgagtctacgcaactatcggcagctacggcatttatcgcccactgagcattaccaaagttgaccccccggttcccggtgaacgtgtcttcccggaatccattgtccgcactgtggtgcatatgatggaaagcgtggcgctaccaggcggcggcggcgtgaaggcggcgattaaaggctatcgtatcgccattaaaaccggtaccgcgaaaaaggtcgggccggacggtcgctacatcaataaatatattgcttataccgcaggcgttgcgcctgcgagtcagccgcgcttcgcgctggttgttgttatcaacgatccgcaggcgggtaaatactacggcggcgccgtttccgcgccggtctttggtgccatcatgggcggcgtattgcgtaccatgaacatcgagccggatgcgctgacaacgggcgataaaaatgaatttgtgattaatcaaggcgaggggacaggtggcagaagctaaagcctgagcgcttcgcgctggttgttgttatcaacgatccgcaggcgggtaaatactacggcggcgccgtttccgcgccggtctttggtgccatcatgggcggcgtattgcgtaccatgaacatcgagccggatgcgctgacaacgggcgataaaaatgaatttgtgattaatcaaggcgaggggacaggtggcagatcgtaatttgcgcgaccttcttgctccgtgggtgccagacgcacctagccgagcactgcgagagatgacactcgacagccgtgtggctgcggcgggcgatctctttgtagctgtagtaggtcatcaggcggacgggcgtcgatatatcccgcaggcgatagcgcaaggtgtggctgccattattgcagaggcgaaagatgaggcgaccgatggtgaaatccgtgaaatgcacggcgtaccggtcatctatctcagccagctcaacgagcgtttatctgcactggcgggccgcttttaccatgaaccctctgacaatttacgtctcgtgggcgtaacgggcaccaacggcaaaaccacgactacccagctgttggcgcagtggagccaactgcttggcgaaatcagcgcggtaatgggcaccgttggtaacggcctgctggggaaagtgatcccgacagaaaatacaaccggtagcgcagtcgatgttcagcatgagctggcggggctggtggatcagggcgcgacgttttgcgcaatggaagtttcctcccacgggctggtacagcaccgtgtggcggcattgaaatttgcggcgagcgtctttaccaacttaagccgcgatcaccttgattatcatggtgatatggaacactacgaagccgcgaaatggctgctttattctgagcatcattgcggtcaggcgattattaacgccgacgatgaagtgggccgccgctggctggcaaaactgccggacgcggttgcggtaagtatggaagatcatattaatccgaactgtcacggacgctggttgaaagcgaccgaagtgaactatcacgacagcggtgcgacgattcgctttagcagtagttggggcgatggcgaaattgaaagccatctgatgggcgcttttaacgtcagcaacctgctgctcgcgctggcgacactgttggcactcggctatccactggctgatctgctgaaaaccgccgcgcgtctgcaaccggtttgcggacgtatggaagtgttcactgcgccaggcaaaccgacggtggtggtggattacgcgcatacgccggatgcactggaaaaagccttacaggcggcgcgtctgcactgtgcgggcaagctgtggtgtgtctttggctgtggtggcgatcgcgataaaggtaagcgtccactgatgggcgcaattgccgaagagtttgctgacgtggcggtggtgacggacgataacccgcgtaccgaagaaccgcgtgccatcatcaacgatattctggcgggaatgttagatgccggacatgccaaagtgatggaaggccgtgctgaagcggtgacttgcgccgttatgcaggctaaagagaatgatgtggtactggtcgcgggcaaaggccatgaagattaccagattgttggcaatcagcgtctggactactccgatcgcgtcacggtggcgcgtctgctgggggtgattgcatgattagcgtaacccttagccaacttaccgacattctcaacggtgaactgcaaggtgcagatatcacccttgatgctgtaaccactgatacccgaaaactgacgccgggctgcctgtttgttgccctgaaaggcgaacgttttgatgcccacgattttgccgaccaggcgaaagctggcggcgcaggcgcactactggttagccgtccgctggacatcgacctgccgcagttaatcgtcaaggatacgcgtctggcgtttggtgaactggctgcatgggttcgccagcaagttccggcgcgcgtggttgctctgacggggtcctccggcaaaacctccgttaaagagatgacggcggcgattttaagccagtgcggcaacacgctttatacggcaggcaatctcaacaacgacatcggtgtaccgatgacgctgttgcgcttaacgccggaatacgattacgcagttattgaacttggcgcgaaccatcagggcgaaatagcctggactgtgagtctgactcgcccggaagctgcgctggtcaacaacctggcagcggcgcatctggaaggttttggcagccttgcgggtgtcgcgaaagcgaaaggtgaaatctttagcggcctgccggaaaacggtatcgccattatgaacgccgacaacaacgactggctgaactggcagagcgtaattggcagtcgcaaagtgtggcgtttcagtcccaatgccgccaacagcgatttcaccgccaccaatatccatgtgaccagccacggtacggaatttaccctacaaaccccaaccggtagcgtcgatgttctgctgccgttgccggggcgtcacaatattgcgaatgcgctggcagccgctgcgctctccatgtccgtgggcgcaacgcttgatgctatcaaagcggggctggcaaatctgaaagctgttccaggccgtctgttccccatccaactggcagaaaaccagttgctgctcgacgactcctacaacgccaatgtcggtagtatgactgcagcagtccaggtactggctgaaatgccgggctaccgcgtgctggtggtgggcgatatggcggaactgggcgctgaaagcgaagcctgccatgtacaggtgggcgaggcggcaaaagctgctggtattgaccgcgtgttaagcgtgggtaaacaaagccatgctatcagcaccgccagcggcgttggcgaacattttgctgataaaactgcgttaattacgcgtcttaaattactgattgctgagcaacaggtaattacgattttagttaagggtagtcgtagtgccgccatggaagaggtagtacgcgctttacaggagaatgggacatgttaatataagctttacaggagaatgggacatgttagtttggctggccgaacatttggtcaaatattattccggctttaacgtcttttcctatctgacgtttcgcgccatcgtcagcctgctgaccgcgctgttcatcagtttgtggatgggcccgcgtatgattgctcatttgcaaaaactttcctttggtcaggtggtgcgtaacgacggtcctgaaagtcacttcagcaagcgcggtacgccgaccatgggcgggattatgatcctgacggcgattgtgatctccgtactgctgtgggcttacccgtccaatccgtacgtctggtgcgtgttggtggtgctggtaggttacggtgttattggctttgttgatgattatcgcaaagtggtgcgtaaagacaccaaagggttgatcgctcgttggaagtatttctggatgagcgtcattgcgctgggtgtcgccttcgccctgtaccttgccggcaaagacacgcccgcaacgcagctggtggtcccattctttaaagatgtgatgccgcagctggggctgttctacattctgctggcttacttcgtcattgtgggtactggcaacgcggtaaacctgaccgatggtctcgacggcctggcaattatgccgaccgtatttgtcgccggtggttttgcgctggtggcgtgggcgaccggcaatatgaactttgccagctacttgcatataccgtatctgcgacacgccggggaactggttattgtctgtaccgcgatagtcggggcaggactgggcttcctgtggtttaacacctatccggcgcaggtctttatgggcgatgtaggtagcctggcgttaggtggtgcgttaggcattatcgccgtactgctacgtcaggaattcctgctggtgattatggggggcgtgttcgtggtagaaacgctttctgtcatcctgcaggtcggctcctttaaactgcgcggacaacgtattttccgcatggcaccgattcatcaccactatgaactgaaaggctggccggaaccgcgcgtcattgtgcgtttctggattattagcctgatgctggttctgattggtctggcaacgctgaaggtacgttaatcatggctgattatcagggtaaaaatgtcgtcattatcggcctgggcctcaccgggctttcctgcgtggactttttcctcgctcgcggtgtgacgccgcgcgttatggatacgcgtatgacaccgcctggcctggataaattacccgaagccgtagaacgccacacgggcagtctgaatgatgaatggctgatggcggcagatctgattgtcgccagtcccggtattgcactggcgcatccatccttaagcgctgccgctgatgccggaatcgaaatcgttggcgatatcgagctgttctgtcgcgaagcacaagcaccgattgtggcgattaccggttctaacggcaaaagcacggtcaccacgctagtgggtgaaatggcgaaagcggcgggggttaacgttggtgtgggtggcaatattggcctgcctgcgttgatgctactggatgatgagtgtgaactgtacgtgctggaactgagcagcttccagctggaaaccacctccagcttacaggcggtagcagcgaccattctgaacgtgactgaagatcatatggatcgctatccgtttggtttacaacagtatcgtgcagcaaaactgcgcatttacgaaaacgcgaaagtttgcgtggttaatgctgatgatgccttaacaatgccgattcgcggtgcggatgaacgctgcgtcagctttggcgtcaacatgggtgactatcacctgaatcatcagcagggcgaaacctggctgcgggttaaaggcgagaaagtgctgaatgtgaaagagatgaaactttccgggcagcataactacaccaatgcgctggcggcgctggcgctggcagatgctgcagggttaccgcgtgccagcagcctgaaagcgttaaccacattcactggtctgccgcatcgctttgaagttgtgctggagcataacggcgtacgttggattaacgatagcaaagcgaccaacgtcggcagtacggaagcggcgctgaatggcctgcacgtagacggcacactgcatttgttgctgggtggcgatggtaaaagcgcggactttagcccactggcgcgttacctgaatggcgataacgtacgtctgtattgtttcggtcgtgacggcgcgcagctggcggcgctacgcccggaagtggcagaacaaaccgaaactatggaacaggcgatgcgcttgctggctccgcgtgttcagccgggcgatatggttctgctctccccagcctgtgccagccttgatcagttcaagaactttgaacaacgaggcaatgagtttgcccgtctggcgaaggagttaggttgatgcgtttatctctccctcgcctgaaaatgccgcgcctgccaggattcagtatcctggtctggatctccacggcgctaaagggctgggtgatgggcagccgggaaaaagataccgacagcctgatcatgtacgatcgcaccttactgtggctgaccttcggcctcgcggcgattggctttatcatggtgaccagcgcgagtatgcccatagggcaacgcttaaccaacgatccgttcttcttcgcgaagcgtgatggtgtctatctgattttggcgtttattctggcgatcattacgctgcgtctgccgatggagttctggcaacgctacagtgccacgatgctgctcggatctatcatcctgctgatgatcgtcctggtagtgggtagcagcgttaaaggggcaagccgttggatcgatctcggtttgctgcgtatccagcctgcggagctgacaaaactgagcctgttttgctatatcgccaactatctggtgcgtaaaggcgacgaagtacgtaataacctgcgcggcttcctgaaaccgatgggcgtgattctggtgttggcagtgttactgctggcacagccagaccttggtacggtggtggtgttgtttgtgactacgctggcgatgttgttcctggcgggagcgaaattgtggcagttcattgccattatcggtatgggcattagtgcggttgtgttgctgatactcgccgaaccgtaccgtatccgccgtgttaccgcattctggaacccgtgggaagatccctttggcagcggctatcagttaacgcaaagcctgatggcgtttggtcgcggcgaactttgggggcaaggtttaggtaacagcgtacaaaaactggagtatctgccggaagcgcacactgactttattttcgccattatcggcgaagaactggggtatgtcggtgtggtgctggcacttttaatggtattcttcgtcgcttttcgcgcgatgagcattggccgtaaagcattagaaattgaccaccgtttttccggttttctcgcctgttctattggcatctggtttagcttccaggcgctggttaacgtaggcgcggcggcggggatgttaccgaccaaaggtctgacattgccgctgatcagttacggtggtagcagcttactgattatgagcacagccatcatgatgctgttgcgtattgattatgaaacgcgtctggagaaagcgcaggcgtttgtacgaggtagtcgatgagtggtcaaggaaagcgattaatggtgatggcaggcggaaccggtggacatgtattcccgggactggcggttgcgcaccatctaatggctcagggttggcaagttcgctggctggggactgccgaccgtatggaagcggacttagtgccaaaacatggcatcgaaattgatttcattcgtatctctggtctgcgtggaaaaggtataaaagcactgatagctgccccgctgcgtatcttcaacgcctggcgtcaggcgcgggcgattatgaaagcgtacaaacctgacgtggtgctcggtatgggaggctacgtgagtggtccaggtggtctggccgcgtggagcttaggcattccggttgtacttcatgaacaaaacggtattgcgggcttaaccaataaatggctggcgaagattgccaccaaagtgatgcaggcgtttccaggtgctttccctaatgcggaagtagtgggtaacccggtgcgtaccgatgtgttggcgctgccgttgccgcagcaacgtttggctggacgtgaaggtccggttcgtgtgctggtagtgggtggttctcagggcgcacgcattcttaaccagacaatgccgcaggttgctgcgaaactgggtgatagtgtcactatctggcatcagagcggcaaaggtagccaacaatccgttgaacaggcgtatgccgaagcggggcaaccgcagcataaagtgacggaatttattgatgatatggcggcggcgtatgcgtgggcggatgtcgtcgtttgccgctccggtgcgttaacggtgagtgaaatcgccgcggcaggactaccggcgttgtttgtgccgtttcaacataaagaccgccagcaatactggaatgcgctaccgctggaaaaagcgggcgcagccaaaattatcgagcagccacagcttagcgtggatgctgtcgccaacaccctggccgggtggagccgagaaaccttattaaccatggcagaacgcgcccgcgctgcatccattccggatgccaccgagcgagtggcaaatgaagtgagccgggttgcccgggcgtaattgtagcgatgccttttgcatcgtatgaatttaagaagttaatggcgtaaagaatgaatacacaacaattggcaaaactgcgttccatcgtgcccgaaatgcgtcgcgttcggcacatacattttgtcggcattggtggtgccggtatgggcggtattgccgaagttctggccaatgaaggttatcagatcagtggttccgatttagcgccaaatccggtcacgcagcagttaatgaatctgggtgcgacgatttatttcaaccatcgcccggaaaacgtacgtgatgccagcgtggtcgttgtttccagcgcgatttctgccgataacccggaaattgtcgccgctcatgaagcgcgtattccggtgatccgtcgtgccgaaatgctggctgagttaatgcgttttcgtcatggcatcgccattgccggaacgcacggcaaaacgacaaccaccgcgatggtttccagcatctacgcagaagcggggctcgacccaaccttcgttaacggcgggctggtaaaagcggcgggggttcatgcgcgtttggggcatggtcggtacctgattgccgaagcagatgagagtgatgcaagcttcctgcatctgcaaccgatggtggcgattgtcaccaatatcgaagccgaccacatggatacctaccagggcgactttgagaatttaaaacagacttttattaattttctgcacaacctgccgttttacggtcgtgcggtgatgtgtgttgatgatccggtgatccgcgaattgttaccgcgagtggggcgtcagaccacgacttacggcttcagcgaagatgccgacgtgcgtgtagaagattatcagcagattggcccgcaggggcactttacgctgctgcgccaggacaaagagccgatgcgcgtcaccctgaatgcgccaggtcgtcataacgcgctgaacgccgcagctgcggttgcggttgctacggaagagggcattgacgacgaggctattttgcgggcgcttgaaagcttccaggggactggtcgccgttttgatttcctcggtgaattcccgctggagccagtgaatggtaaaagcggtacggcaatgctggtcgatgactacggccaccacccgacggaagtggacgccaccattaaagcggcgcgcgcaggctggccggataaaaacctggtaatgctgtttcagccgcaccgttttacccgtacgcgcgacctgtatgatgatttcgccaatgtgctgacgcaggttgataccctgttgatgctggaagtgtatccggctggcgaagcgccaattccgggagcggacagccgtagcctgtgtcgcacaattcgtggacgtgggaaaattgatcccattctggtgccggatccggcgcgggtagccgagatgctggcaccggtattaaccggtaacgacctgattctcgttcagggggctggtaatattggaaaaattgcccgttctttagctgaaatcaaactgaagccgcaaactccggaggaagaacaacatgactgataaaatcgcggtcctgttgggtgggacctccgctgagcgggaagtttctctgaattctggcgcagcggtgttagccggactgcgtgaaggcggtattgacgcgtatcctgtcgacccgaaagaagtcgacgtgacgcaactgaagagcatgggctttcagaaagtgtttatcgcgctacacggtcgcggcggtgaagatggtacgctgcaggggatgctcgagctgatgggcttgccttataccggaagcggagtgatggcatctgcgcttagtatggataaactacgcagcaaacttctatggcaaggtgccggtttaccggtcgcgccgtgggtagcgttaacccgcgcagagtttgaaaaaggcctgagcgataagcagttagcagaaatttctgctctgggtttgccggttatcgttaagccgagccgcgaaggttccagtgtgggaatgagtaaagtagtagcagaaaatgctctacaagatgcattaagattggcatttcagcacgatgaagaagtattgattgaaaaatggctaagtgggccggagttcacggttgcgatactcggtgaagaaattttaccgagtatacgtattcaaccgtccggaaccttctatgattatgaggcgaagtatctctctgatgagacacagtatttctgccccgcaggtctggaagcgagtcaagaggccaatttgcaggcattagtgctgaaagcatggacgacgttaggttgcaaaggatggggacgtattgacgttatgctggacagcgatggacagttttatctgctggaagccaataccagtccgggtatgaccagccacagcctggtgccgatggcggcacgtcaggcaggtatgagcttcagccagttggtagtacgaattctggaactggcggactaatatgagccaggctgctctgaacacgcgaaacagcgaagaagaggtttcttctcgccgcaataatggaacgcgtctggcggggatccttttcctgctgaccgttttaacgacagtgttggtgagcggctgggtcgtgttgggctggatggaagatgcgcaacgcctgccgctcagtaagctggtgttgaccggtgaacgccattacacacgtaatgacgatatccggcagagcatcctggcattgggtgagccgggtacctttatgacccaggatgtcaacatcatccagacgcaaatagaacaacgcctgccgtggattaagcaggtgagcgtcagaaagcagtggcctgatgaattgaagattcatctggttgaatatgtgccgattgcgcggtggaatgatcaacatatggtagacgcggaaggaaataccttcagcgtgccgccagaacgcaccagcaagcaggtgcttccaatgctgtatggcccggaaggcagcgccaatgaagtgttgcagggctatcgcgaaatggggcagatgctggcaaaggacagatttactctgaaggaagcggcgatgaccgcgcggcgttcctggcagttgacgctgaataacgatattaagctcaatcttggccggggcgatacgatgaaacgtttggctcgctttgtagaactttatccggttttacagcagcaggcgcaaaccgatggcaaacggattagctacgttgatttgcgttatgactctggagcggcagtaggctgggcgcccttgccgccagaggaatctactcagcaacaaaatcaggcacaggcagaacaacaatgatcaaggcgacggacagaaaactggtagtaggactggagattggtaccgcgaaggttgccgctttagtaggggaagttctgcccgacggtatggtcaatatcattggcgtgggcagctgcccgagccgtggtatggataaaggcggggtgaacgacctcgaatccgtggtcaagtgcgtacaacgcgccattgaccaggcagaattgatggcagattgtcagatctctagcgtatatctggcgctttctggtaagcacatcagctgccagaatgaaattggtatggtgcctatttctgaagaagaagtgacgcaagaagatgtggaaaacgtcgtccataccgcgaaaagcgtgcgtgtgcgcgatgagcatcgtgtgctgcatgtgatcccgcaagagtatgcgattgactatcaggaagggatcaagaatccggtaggacttagcggcgtgcggatgcaggcaaaagtgcacctgatcacatgtcacaacgatatggcgaaaaacatcgtcaaagcggttgaacgttgtgggctgaaagttgaccaactgatatttgccggactggcaagtagttatagcgtattgacggaagatgaacgtgaactgggtgtctgcgtcgtcgatatcggtggtggtacaatggatatcgccgtttataccggtggggcattgcgccacactaaggtaattccttatgctggcaatgtcgtgaccagtgatatcgcttacgcctttggcacgccgccaagcgacgccgaagcgattaaagttcgccacggttgtgcgctgggttccatcgttggaaaagatgagagcgtggaagtgccgagcgtaggtggtcgtccgccacggagtctgcaacgtcagacactggcagaggtgatcgagccgcgctataccgagctgctcaacctggtcaacgaagagatattgcagttgcaggaaaagcttcgccaacaaggggttaaacatcacctggcggcaggcattgtattaaccggtggcgcagcgcagatcgaaggtcttgcagcctgtgctcagcgcgtgtttcatacgcaagtgcgtatcggcgcgccgctgaacattaccggtttaacggattatgctcaggagccgtattatagcacggcggtgggattgcttcactatgggaaagagagtcatcttaacggtgaagctgaagtagaaaaacgtgttacagcaagtgttggcagctggatcaagcgactcaatagttggctgcgaaaagagttttaatttttatgaggccgacgatgattacggcctcaggcgacaggcacaaatcggagagaaactatgtttgaaccaatggaacttaccaatgacgcggtgattaaagtcatcggcgtcggcggcggcggcggtaatgctgttgaacacatggtgcgcgagcgcattgaaggtgttgaattcttcgcggtaaataccgatgcacaagcgctgcgtaaaacagcggttggacagacgattcaaatcggtagcggtatcaccaaaggactgggcgctggcgctaatccagaagttggccgcaatgcggctgatgaggatcgcgatgcattgcgtgcggcgctggaaggtgcagacatggtctttattgctgcgggtatgggtggtggtaccggtacaggtgcagcaccagtcgtcgctgaagtggcaaaagatttgggtatcctgaccgttgctgtcgtcactaagcctttcaactttgaaggcaagaagcgtatggcattcgcggagcaggggatcactgaactgtccaagcatgtggactctctgatcactatcccgaacgacaaactgctgaaagttctgggccgcggtatctccctgctggatgcgtttggcgcagcgaacgatgtactgaaaggcgctgtgcaaggtatcgctgaactgattactcgtccgggtttgatgaacgtggactttgcagacgtacgcaccgtaatgtctgagatgggctacgcaatgatgggttctggcgtggcgagcggtgaagaccgtgcggaagaagctgctgaaatggctatctcttctccgctgctggaagatatcgacctgtctggcgcgcgcggcgtgctggttaacatcacggcgggcttcgacctgcgtctggatgagttcgaaacggtaggtaacaccatccgtgcatttgcttccgacaacgcgactgtggttatcggtacttctcttgacccggatatgaatgacgagctgcgcgtaaccgttgttgcgacaggtatcggcatggacaaacgtcctgaaatcactctggtgaccaataagcaggttcagcagccagtgatggatcgctaccagcagcatgggatggctccgctgacccaggagcagaagccggttgctaaagtcgtgaatgacaatgcgccgcaaactgcgaaagagccggattatctggatatcccagcattcctgcgtaagcaagctgattaagaattgactggaatttgggtttcgaggctctttgtgctaaactggcccgccgaatgtatagtacacttcggttggataggtaatttggcgagataatacgatgatcaaacaaaggacacttaaacgtatcgttcaggcgacgggtgtcggtttacataccggcaagaaagtcaccctgacgttacgccctgcgccggccaacaccggggtcatctatcgtcgcaccgacttgaatccaccggtagatttcccggccgatgccaaatctgtgcgtgataccatgctctgtacgtgtctggtcaacgagcatgatgtacggattagtaccgtagagcacctcaatgctgctctcgcgggcttgggcatcgataacattgttatcgaagttaacgcgccggaaatcccgatcatggacggcagcgccgctccgtttgtatacctgctgcttgacgccggtatcgacgagttgaactgcgccaaaaaatttgttcgcatcaaagagactgttcgtgtcgaagatggcgataagtgggctgaatttaagccgtacaatggttttagcctggatttcaccatcgattttaaccatccggctattgattccagcaaccagcgctatgcgatgaacttctccgctgatgcgtttatgcgccagatcagccgtgcgcgtacgttcggtttcatgcgtgatatcgaatatctgcagtcccgtggtttgtgcctgggcggcagcttcgattgtgccatcgttgttgacgattatcgcgtactgaacgaagacggcctgcgttttgaagacgaatttgtgcgtcacaaaatgctcgatgcgatcggtgacttgttcatgtgtggtcacaatattattggtgcatttaccgcttataaatccggtcatgcactgaataacaaactgctgcaggctgtcctggcgaaacaggaagcctgggaatatgtgaccttccaggacgacgcagaactgccgttggccttcaaagcgcctagtgctgtactggcataacgacatttatactgtcgtataaaattcgactggcaaatctggcactctctccggccaggtgaaccagtcgtttttttttgaattttataagagctataaaaaacggtgcgaacgctgttttcttaagcacttttccgcacaacttatcttcattcgtgctgtggactgcaggctttaatgataagatttgtgcgctaaatacgtttgaatatgatcgggatggcaataacgtgagtggaatactgacgcgctggcgacagtttggtaaacgctacttctggccgcatctcttattagggatggttgcggcgagtttaggtttgcctgcgctcagcaacgccgccgaaccaaacgcgcccgcaaaagcgacaacccgcaaccacgagcctagtgccaaagttaactttggtcaattggccttgctggaagcgaacacacgccgcccgaatagcaactattccgttgattactggcatcaacatgccattcgcacggtaatccgtcatctttctttcgcaatggcaccgcaaacactgcccgttgctgaagaatctttgcctcttcaggcgcaacatcttgcattactggatacgctcagcgcgctgctgacccaggaaggcacgccgtctgaaaagggttatcgcattgattatgcgcattttaccccacaagcaaaattcagcacgcccgtctggataagccaggcgcaaggcatccgtgctggccctcaacgcctcacctaacaacaataaacctttacttcattttattaactccgcaacgcggggcgtttgagattttattatgctaatcaaattgttaactaaagttttcggtagtcgtaacgatcgcaccctgcgccggatgcgcaaagtggtcaacatcatcaatgccatggaaccggagatggaaaaactctccgacgaagaactgaaagggaaaaccgcagagtttcgtgcacgtctggaaaaaggcgaagtgctggaaaatctgatcccggaagctttcgccgtggtacgtgaggcaagtaagcgcgtctttggtatgcgtcacttcgacgttcagttactcggcggtatggttcttaacgaacgctgcatcgccgaaatgcgtaccggtgaaggaaaaaccctgaccgcaacgctgcctgcttacctgaacgcactaaccggtaaaggcgtgcacgtagttaccgtcaacgactacctggcgcaacgtgacgccgaaaacaaccgtccgctgtttgaattccttggcctgactgtcggtatcaacctgccgggcatgccagcaccggcaaagcgcgaagcttacgcagctgacatcacttacggtacgaacaacgaatacggctttgactacctgcgcgacaacatggcgttcagccctgaagaacgtgtacagcgtaaactgcactatgcgctggtggacgaagtggactccatcctgatcgatgaagcgcgtacaccgctgatcatttccggcccggcagaagacagcagcgaaatgtataaacgcgtgaataaaattattccgcacctgatccgtcaggaaaaagaagactccgaaaccttccagggcgaaggccacttcagcgtggacgaaaaatctcgccaggtgaacctgaccgaacgtggtctggtgctgattgaagaactgctggtgaaagagggcatcatggatgaaggggagtctctgtactctccggccaacatcatgctgatgcaccacgtaacggcggcgctgcgcgctcatgcgctgtttacccgtgacgtcgactacatcgttaaagatggtgaagttatcatcgttgacgaacacaccggtcgtaccatgcagggccgtcgctggtccgatggtctgcaccaggctgtggaagcgaaagaaggtgtgcagatccagaacgaaaaccaaacgctggctagcatcaccttccagaactacttccgtctgtatgaaaaactggcggggatgaccggtactgctgataccgaagctttcgaatttagcagtatctacaagctggataccgtcgttgttccgaccaaccgtccaatgattcgtaaagatctgccggacctggtctacatgactgaagcggaaaaaattcaggcgatcattgaagatatcaaagaacgtactgcgaaaggccagccggtgctggtgggtactatctccatcgaaaaaagcgagctggtgagtaacgaactgaccaaagccggtattaagcacaacgtcctgaacgccaaattccacgccaacgaagcggcgattgttgctcaggcaggttatccggctgcggtgactatcgcgaccaatatggcgggtcgtggtacagatattgtgctcggtggtagctggcaggcagaagttgccgcgctggaaaatccgaccgcagagcaaattgaaaaaattaaagccgactggcaggtacgtcacgatgcggtactggaagcaggtggcctgcatatcatcggtaccgagcgtcacgaatcccgtcgtatcgataaccagttgcgcggtcgttctggtcgtcagggggatgctggttcttcccgtttctacctgagcatggaagatgcgctgatgcgtatttttgcttccgaccgagtatccggcatgatgcgtaaactgggtatgaagccaggcgaagccattgaacacccgtgggtgactaaagcgattgccaacgcccagcgtaaagttgaaagccgtaacttcgacattcgtaagcaactgctggaatatgatgacgtggctaacgatcagcgtcgcgccatttactcccagcgtaacgaactgttggatgtcagcgatgtgagcgaaaccattaacagcattcgtgaagatgtgttcaaagcgaccattgatgcctacattccaccacagagcctggaagaaatgtgggatattccggggctgcaggaacgtctgaagaacgatttcgacctcgatttgccaattgccgagtggctggataaagaaccagaactgcatgaagagacgctgcgtgagcgcattctggcgcagtccatcgaagtgtatcagcgtaaagaagaagtggttggtgctgagatgatgcgtcacttcgagaaaggcgtcatgctgcaaacgcttgactccctgtggaaagagcacctggcagcgatggactatctgcgtcagggtatccacctgcgtggctacgcacagaaagatccgaagcaggaatacaaacgtgaaagcttctccatgtttgcagcgatgctggagagcttgaaatatgaagttatcagtacgctgagcaaagttcaggtacgtatgcctgaagaggttgaggagctggaacaacagcgtcgtatggaagccgagcgtttagcgcaaatgcagcagcttagccatcaggatgacgactctgcagccgcagctgcactggcggcgcaaaccggagagcgcaaagtaggacgtaacgatccttgcccgtgcggttctggtaaaaaatacaagcagtgccatggccgcctgcaataaaagctaactgttgaagtaaaaggcgcaggattctgcgccttttttataggtttaagacaatgaaaaagctgcaaattgcggtaggtattattcgcaacgagaacaatgaaatctttataacgcgtcgcgcagcagatgcgcacatggcgaataaactggagtttcccggcggtaaaattgaaatgggtgaaacgccggaacaggcggtggtgcgtgaacttcaggaagaagtcgggattaccccccaacattttagcctatttgaaaaactggaatatgaattcccggacaggcatataacactgtggttttggctggtcgaacgctgggaaggggagccgtggggtaaagaagggcaacccggtgagtggatgagcctggtcggtcttaatgccgatgattttccgccagccaatgaaccggtaattgcgaagcttaaacgtctgtaagtcagataaggcgttttcgccgcatccgacattcgcacacgatgcctgatgcgacgctggcgcgtcttatcaggcctaaagggatttctaactcattgataaatttgtttttgtaggtcggataaggcgttcacgccgcatccgacatttgcacaagatgcctgatgcgacgctgtccgcgtcttatcaggcctacgtgcggcatcagacaaatgtcactgctttggttcttcgctccagtcatcgctttcggaaagatcgccactgctggggattcgtttttcttcagcagcccattctccgaggtcgatcagctgacaacgtttggagcaaaatggccgaaacgggctgatttcaccccacaccaccgttttcccgcaggttgggcaattcaccgtaatagtttcactcatttttactccttagcaacaggccagttcgaaatccagacgttccggtacctgtccgttttcagtgtccagcggcataaaacgaatggcaaaacggctcttatgtccggaaatttgcggataaagctgactatcgaggctcagattcaggcgcagcaagtcggcatcgccaccgttatcctgataaaaaccattcaggctggtttgtttacggaagggggcgctctggcgaattaaatccagcaccatggtaagtgcctgggtgagcgggttcaggctggcaatccaggtttctacctggctgtcgcgctgcgcctggggtagatgcagccaaatgtgcaatgtaggtaaatcaaagctgcaacagccgcctgggatgctcagtcgctgacgcaccagagcaatcaaacgatcttcacgcagaaattgcccgatacgcggcgcggaaattaatacgctccccgccgcttttaactgctgaattaatgcttcaatacggctctggtccacgccaggcacgccaatccaggtctggagtttacgttgctgccggtcaagttctttcaacagctcagtgcggacttcgccgcgctcgaaaacatccagtaattcactgacattacggaagaaatgcagcgcgccagcgtggtcaacgatgggtaaattaacggtgagttgctgaatcaaaaactcaatgcgcagccatgtacgcattttttcatttagtggatgttcaaaaaggacctgggtctgcattacggtttttcctgactgacaaactggctcgcaagctgcaaatagtgtgcgtgcaggcgggcaacatcgcttgcgatagcatccggtgcgccgttattatcaatgacgtcatctgccacggcaaggcgggcttcgcgcgttgcctgagcagcaaggatttgttcgacatgctcgcgagttacatcatcgcgctgcatggtgcgcttaagttgcgtttctgggctgacatccaccacaagcactcgattcgcttttttatacagactgttttctaccagcaatggcacaacccacagtacatagggggaagtagcttgctggatctggtgttgcgtctcttgctgaatcagcggatgcagcagggcgttaagccagtttttctcttccgggttggcgaagatccgctcgcgcaaggcccggcgctgcaatgttccatcagcagcaatcatgttagcgccaaagtgatcagcaatggcatgtagcgcaggtgcacctggttcaaccacctgacgcgcaataatatcggcatcaatgacgttaattccgagatcagcaaacgcattggcaacggtactcttgccactgccaatgcctcccgttaaggcaactatatacctcataatttatattcccgggaattcatcatgattatcaaaacgttaaaaatgagtgcacgaaagcgaaattgatgaaacgttcgctcactatttaccaggtaaatttatgggattgtagcgtaaaaaaagacaatttcgcagtcttgcgccgcattgattagtgcgtatgatagcgtcactggagttgcgctcttacccttatagccattaaccccaggaatccgcacatgcgtattgaagaagatctgaagttaggttttaaagacgttctcatccgccctaaacgctccactcttaaaagccgttccgatgttgaactggaacgtcaattcaccttcaaacatagtggtcagagctggtccggcgtgccgattatcgccgcaaatatggacaccgtaggcacattttctatggcctctgcgctggcttcttttgatattttgactgctgtgcataaacactattctgtcgaagagtggcaagcgtttatcaacaattcttccgctgatgtgctgaaacatgtgatggtttctaccggtacgtctgatgcggatttcgaaaaaactaaacagattctcgacctgaacccggcattaaacttcgtttgtattgacgtggcgaatggttattccgaacacttcgtgcagttcgttgcgaaagcgcgtgaagcgtggccgaccaaaaccatttgtgctggtaacgtagtgactggtgaaatgtgtgaggagcttatcctcagtggtgccgatatcgttaaagttggcattggcccaggttctgtttgtacaactcgcgtcaaaacaggcgtcggttatccgcaactttctgcggtaatcgaatgtgccgatgctgcgcacggtctgggcggaatgatcgtcagcgatggtggctgcaccacgccgggcgatgtggcgaaagcctttggcggcggtgccgatttcgtcatgcttggcggcatgctggcgggccacgaagagagcggcggtcgcatcgttgaggagaacggcgagaaatttatgctgttctacggcatgagctccgagtctgcgatgaaacgtcacgttggcggcgttgcggaatatcgcgcagcagaaggtaaaaccgttaagctgccgctgcgaggcccggttgaaaataccgcgcgagatattttgggcggcctgcgtagtgcttgtacatacgttggggctagtcgcctgaaagagctgaccaagcgcaccacgtttattcgtgtgcaggaacaagaaaaccgcatcttcaacaacctgtaatctcccaacgctggcgtggagcaacacgccagcgttatcccatcccactcatcgcatcgcctaaatggaaaattggcagatacattgccaccaccagcgtaccaataattcctcccgttatgatcagcaacgccggttccagtaaggctgcgaggttatccgccagcgccattgtgttttcccgatgatgatgggcgaggttgtctaacatgagatccagagagccggatgcctctcctgttctcactaattgcaaacagagcgggctaaactcaccggtattttttagcgccagccagatgggttgaccgttactgatatcgtgctggatttgtgtcagaagttgcacccagtacgggcagcgcattgtttctctgacgctctctacgccctgtaaaaaagtaatgcctgcactttgtgtcagcgccagaatcgtaaagatctgcgtgagtttttgtccccgcatcagactacccataatcgggatgcgtaacagcaatttctgccgcactataagccaggtcggtcggcgcatcagcaacttattggctatcgccagcagaaagccgaacaacaccagcagccagctccattcgccactaaagtctgccagcgtcatgatcccctgcgttagtgccggtagtggggtgttgaaggtcttatagatagcggcaaactccggcagaacaaaatgcagcattgccacaaccaccatgattgccatcgctaaaatgatgatgggataacgtaacgcacttttcactttgtcggtcaactgacgctgggctttttgctgacgcgccagttcaaagcagcattcatccagcttaccggtcagttcacccgtgcggatcatcgcctgatagagcggcggaaatacctcactccagggtaataaggcattggaaaaagcaatgccctgttcgagatcgtgcgccaggctttgcagcaacgcttgccattgcttactgggatgctgttccgccagcagagccagcccttcagaaagcgttaaccctgctttgagtagcgtcgccagttgatgaatgacttccgcgcttttatctcctcgccactgcgcagaattgatggcgattcgcttcaggcttagtggggtaaccatctgttgctgtagtgccataagcagtaaagtacggctctctgcccatagcatcccatcttgcgcattgccgtcgccggttatgccatgccagcgccagagttgcttactcgccatgcggcatccccagtacgcggattaactcttcaaaggtggttaagccttgctctacggccaggcagccgttttcaaaaagcgtacgcatacccgcctgtcgtgcgtgcgtttccaggctttcaacgtcggtattagcggaaataagctgacgaatgaccggcgttatgggcagaacttcaaataaggccgtacgaccataaaaaccgtggtagcaatgtacacaaccgggtgcctgccagtggggcagcgggcttggccatacattgtctggaatgtggatgggctccccttgctgccggcgacaatgtgggcaaagtttgcgtaccagacgctgggctattaccagcgtaagcgcgctacttagcatccagcgggcgacccccatttgctgtaaacgtaccagcgtttcgcaggtggaattagtgtgtagggtagacaacaccaggtgaccagtttgcgccgctttaatagcgatctctgctgtttcgccatcgcggatctctccgatcatgatgacgtcaggatcctggcgcaataacgcacgcaaaacgccctgaaaggtgagtccggcacgcggatggatttgcgtctggtttagtccggctatggggatctcaactggatcttcgacgctacaaatattaatgtcagcggtattcagcttttgcagggcactataaagcgtgaccgttttgccgctgccggtagggccagttaccagcaccagtccctgtggttgttgcaaggcatgagcaaagtccgccagttgtaacggctgcattccaagcgtgttgacatccagtgcctgacccacctgctgtaacaaccttaataccaccttttcaccaccccgacatggtaaggtcgcaatacgaaaactgacggcgtttcctgccagttcgacagtgaattgcccgtcctgcggcaggcgatgttccgcaatatccaggtttcccagcacttttaatctggcggttaatgcgactccggcatccggactaacatccggtaaaggatgcaatacgccgtcgatacgcaagcggatgcggtaggcattgtccgctggttcgatatgaatatcagacgcgcgttgttccagcgcagattgtaacgttcgagttagcaactctgctttgggctgatgcttctcctgaacagctacgggcagtgtctgttgtgtgcgactggcgtgaccttccatttgttggcgcgtccagcaggtgatctcaatacgtttggtggtagcgaaatgcaatgcgtccagtagctcatggctaggtgcatcgactaccgcaacatgaaccacctcttcgctggcatccagcaagactccatgataacgcagacacagggcagtgagctgtggaatattcattgccgctccttagttggcgtcatcaaagcggaagacatcttcgcaggcttgctgcaatgcgctgtcactttgaatattgcagttgcgcgtccagccggtgacgccgtttgcgttatcccaacccggtgtcatgacgacgcttagcccattgagactttcttgcccggtcaggctcaccacgccctttgccacactcatggcactaacatagcgggtggtggtagggctgggaatgccattgctgccaccgtcgcaggtatctaatccaccatgttccagcgcgcacaactctacggcggtacggtaaggcacaaaggtttgtagcatgtcggtgagtgcggctttgcgcaggtagttttgataagcgggaataccaatggcgcttaaaatggcaatgatgccaataaccaccatcagttcgataagtgtaaaaccgcgttgcttgtccatctgtttcgctccttgatttggttggcgctactttggcaaacgccatcagcacaggcgaggggcaaaaaacgaaacgggaaagcagattccgaggttttttatttcgttgcagcgaaagacaagaaatttgcgaggcgttacgaagaaagttggggaaggggagattatccgcccgcgatggagcggataaatctgtcaactattagcgaaaacgcatactaaggtcgagtgcttgtacgtgtttagttagcgcaccgacggagataaagtccacgcccgtttcggcaaattcacgcagtgttttgtcagtgacgttgccagacacttccagtagcgccttgccgttggtgcgtttgacggcttcgcgcatctgttctgtttcgaagttatccagcatgatgatatcggctcctgctttcagggcttcatcaagttcttccagattctctacttcgacttctactggcgcatccgggtgcagccaggacgctttttcgaccgcctggcgcacactgccggaggcaataatatggttttctttgatcaggaaggcatcagaaagccccagacggtgattcgctccgccgccgcaaagtaccgcgtatttcagagcactacgcaggccgggtaaggttttgcgcgtatccaacaactgcgtgttggtgccttccagcaattcgacatagtggcgtaccttactggcaactccactaagggtttgcacaaaattaagcgcagtgcgttcgcccgttaacagcacgcgggatgggccttcaagttcgaacaaggattgattggcattgatgacatcgccgtcatccacatgccagattatggtgacatcgtcgcctgccagttgaataaacacctcttcaacccagcgtttgccgcaaaagacgccattctcgcgggtgatcaccgtggcatgagagcgagaattttccggtaaaagttttgccgtaatatcattgttggcatcgactgttccgcctaaatcttcccgcagcgcctgggccaccgcgccggggatatcgagattaatgcgttccagcagctcgtcacgtcgggtgtcagggttatagcggcgaggcggcatgttaaaactccagatagctaacgaatcataaggtagaaacatgctactctgaaccgggtattagcaccacatataaggagatcctgcatgttgttagaacaggggtggctggttggcgcgcgccgcgttcccagtccacattacgattgccgcccggatgacgaaacacccaccctgctggtggtgcacaatattagcctgccgccaggcgagtttggcggtccgtggatcgacgcattattcactggaactattgatccgcaggcacatcctttctttgctgagatcgcccatttgcgcgtctccgctcactgtttgattcgccgtgatggtgaaatagtccagtatgttcctttcgataaacgtgcatggcatgcgggagcctctcagtatcaggggcgcgaacgctgcaatgatttttctattgggattgagcttgaaggcaccgatacgctggcgtataccgatgcgcagtatcaacagcttgcggcggttacgcgggcactgattgattgctatccggatatcgctaaaaacatgacgggccattgtgatattgcgccggatcggaaaaccgatcccggtcctgcatttgattgggcacggtttcgtgtgctggtcagcaaggagacaacatgacgctatttacaaccttactggtgttaattttcgagcgcctgtttaagttgggcgagcactggcagcttgatcatcgtcttgaagcgttctttcggcgggtgaaacatttttctctcgggcgcacgttaggcatgaccattattgcgatgggcgtgacttttttactgttacgcgcattgcagggagtattgttcaacgttcccacgctactggtgtggctgctgattggtttgctgtgtattggcgcaggtaaagttcgtcttcattatcatgcttatctgacagctgctagtcgtaatgatagccatgcccgtgccacgatggctggcgaactcaccatgattcacggcgtcccggcaggctgcgacgaacgtgagtatttgcgtgagctgcaaaatgcattgctgtggattaactttcgtttttatcttgcaccgctgttctggctgattgtggggggaacctggggacccgttacgctgatggggtatgcgtttttgcgtgcatggcaatactggctggcgcgatatcagacgccgcatcatcgtttacagtccggcattgatgccgtgcttcatgtactggattgggtgccggttcgtcttgcgggtgtggtatatgccttgatcggtcatggtgagaaagcgttaccggcctggtttgctagcctgggtgatttccatactagccagtatcaggtgttaacgcgtctggcgcagttctctctggcgcgtgaaccgcatgtcgataaggtggagacgccgaaggcagcggttagtatggcgaagaaaaccagcttcgtggtcgtggtggtgattgcactactgacgatttacggggcgttggtgtaaagattattgccctcaccctgtacgggtgagggcgtagagagattaatgcgcttttacggctttggcggttttctctttaaacagatagccgatacctaacacgatcagccataccgggatcaggtatacgctaatcgccattcctggggtcatcagcataatcaccagtaccgccgccataaacagcaggcagatccagttacccagcggataaagcagagcagggaagcgagttaccacgccttgttcctgcttggcgcgacggaatttcatatgcgccaggctaatcatcgcccagttgattaccagtgcagataccaccagcgccattaacagtccgaaagcggactctggggcaaggtagttaatcagtacgcacaacgccgttaccagtgcagacaccagaatggtatttactggtacaccacgtttatcgacagacgccagcgcttttggcgcattaccctgttgtgccagaccaaacagcatacggctgttgcaatatacgcagctgttgtacacggagagcgccgcagtcagtaccacgatgttcagcgcattcgccacaaaggtatcgcctaactcgtggaagatcagcacaaacggactggtatcggcggtaacgcgggtccacggcatcagactgagcagaacggctaagctaccaatatagaaaatcaggatgcggtagataacctggttagttgctttcggtatactttgctccgggttatcagcttctgctgcggtgatccccaccagttccagaccaccgaagctgaacatgataatcgccatcatcatcaccagcccggtgaagccgtgcggcaggaaaccaccctgatcccacaggttgctaacggtcgcctgcgggccgccgttgccactgaatagcagccagccgccgaagatgatcatcgctaccaccgcgataactttgataatggcaaaccagaactccatctcgccaaacactttaacgttggtcaggttgatggcgttaatcaccacaaagaatacggcggcagaaacccaggtggggatttccggataccagaactgaatgtatttacccacggcagtcagctcagccatggcaactaaaacgtacagtacccagtagttccagccagaggcgaaaccggcaaaactgccccagtatttataagcaaagtggctaaaggagcctgcgacaggttcttcgaccaccatttcacccagctgacgcatgatcagaaaggcgataaaaccagcaatggcgtaacccaggataatccctggccctgcggactgtattacggaggcgctacccaggaataacccggtccctatcgcgccacccagcgcgataagctgaatatggcggtttttaaggccgcgctttagctgctcgccgtgctgttgaccttccatcatgaaacctcgtgcggtggttgtttttttgatctacgcagtgatgcgtgtgtaagtttgcaattccgtttgttgtattaatttgtttacatcaaagaagtttgaattgttacaaaaagacttccgtcagatcaagaataatggtatgcggcagcgaatgcacccgctttatgcatggttgaagatgagttgcttaaaaagaaaccgtttgtaaagctcagcctcaacccctctcaatatgtagaatgaatttaaattcgttttaattgaattaaaaatcacaaaattggtaagtgaatcggttcaattcggatttttatagtttaataatcgttaaaaaactcctttcctacgtaaagtctacatttgtgcatagttacaactttgaaacgttatatatgtcaagttgttaaaatgtgcacagtttcatgatttcaatcaaaacctgtatggacataaggtgaatactttgttactttagcgtcacagacatgaaattggtaagaccaattgacttcggcaagtggcttaagacaggaactcatggcctacagcaaaatccgccaaccaaaactctccgatgtgattgagcagcaactggagtttttgatcctcgaaggcactctccgcccgggcgaaaaactcccaccggaacgcgaactggcaaaacagtttgacgtctcccgtccctccttgcgtgaggcgattcaacgtctcgaagcgaagggcttgttgcttcgtcgccagggtggcggcacttttgtccagagcagcctatggcaaagcttcagcgatccgctggtggagctgctctccgaccatcctgagagtcagtatgacttgctcgaaacacgacacgccctggaaggtatcgccgcttattacgccgcgctgcgtagtaccgatgaagacaaggaacgcatccgtgaactccaccacgccatagagctggcgcagcagtctggcgatctggacgcggaaagtaacgccgtactccagtatcagattgccgtcaccgaagcggcccacaatgtggttctgcttcatctgctaaggtgtatggagccgatgttggcccagaatgtccgccagaacttcgaattgctctatagccgtcgcgagatgctgccgctggtgagtagtcaccgcacccgcatatttgaagcgattatggccggtaagccggaagaagcgcgcgaagcaagccatcgccatctggcctttatcgaagaaattttgctcgacagaagtcgtgaagagagccgccgtgagcgttctctgcgtcgtctggagcaacgaaagaattaatgatttttctggtaaaaattatccagaagatgttgtaaatcaagcgcatataaaagcgcggcaactaaacgtagaacctgtcttattgagctttccggcgagagttcaatgggacaggttccagaaaactcaacgttattagatagataaggaataacccatgagtgaacgtttcccaaatgacgtggatccgatcgaaactcgcgactggctccaggcgatcgaaagcgtcatccgtgaagaaggtgttgagcgtgctcagtatctgatcgaccaactgcttgctgaagcccgcaaaggcggtgtaaacgtagccgcaggcacaggtatcagcaactacatcaacaccatccccgttgaagaacaaccggagtatccgggtaatctggaactggaacgccgtattcgtagtgctatccgctggaacgccatcatgacggtgctgcgtgcgagcaaaaaagacctcgaactgggcggccatatggcgtccttccagtcttccgcaaccatttatgatgtgtgctttaaccacttcttccgtgcacgcaacgagcaggatggcggcgacctggtttacttccagggccacatctccccgggcgtgtacgctcgtgctttcctggaaggtcgtctgactcaggagcagctggataacttccgtcaggaagttcacggcaatggcctctcttcctatccgcacccgaaactgatgccggaattctggcagttcccgaccgtatctatgggtctgggtccgattggtgctatttaccaggctaaattcctgaaatatctggaacaccgtggcctgaaagatacctctaaacaaaccgtttacgcgttcctcggtgacggtgaaatggacgaaccggaatccaaaggtgcgatcaccatcgctacccgtgaaaaactggataacctggtcttcgttatcaactgtaacctgcagcgtcttgacggcccggtcaccggtaacggcaagatcatcaacgaactggaaggcatcttcgaaggtgctggctggaacgtgatcaaagtgatgtggggtagccgttgggatgaactgctgcgtaaggataccagcggtaaactgatccagctgatgaacgaaaccgttgacggcgactaccagaccttcaaaagcaaagatggtgcgtacgttcgtgaacacttcttcggtaaatatcctgaaaccgcagcactggttgcagactggactgacgagcagatctgggcactgaaccgtggtggtcacgatccgaagaaaatctacgctgcattcaagaaagcgcaggaaaccaaaggcaaagcgacagtaatccttgctcataccattaaaggttacggcatgggcgacgcggctgaaggtaaaaacatcgcgcaccaggttaagaaaatgaacatggacggtgtgcgtcatatccgcgaccgtttcaatgtgccggtgtctgatgcagatatcgaaaaactgccgtacatcaccttcccggaaggttctgaagagcatacctatctgcacgctcagcgtcagaaactgcacggttatctgccaagccgtcagccgaacttcaccgagaagcttgagctgccgagcctgcaagacttcggcgcgctgttggaagagcagagcaaagagatctctaccactatcgctttcgttcgtgctctgaacgtgatgctgaagaacaagagcatcaaagatcgtctggtaccgatcatcgccgacgaagcgcgtactttcggtatggaaggtctgttccgtcagattggtatttacagcccgaacggtcagcagtacaccccgcaggaccgcgagcaggttgcttactataaagaagacgagaaaggtcagattctgcaggaagggatcaacgagctgggcgcaggttgttcctggctggcagcggcgacctcttacagcaccaacaatctgccgatgatcccgttctacatctattacagcatgttcggcttccagcgtattggcgatctgtgctgggcggctggcgaccagcaagcgcgtggcttcctgatcggcggtacttccggtcgtaccaccctgaacggcgaaggtctgcagcacgaagatggtcacagccacattcagagcctgactatcccgaactgtatctcttacgacccggcttacgcttacgaagttgctgtcatcatgcatgacggtctggagcgtatgtacggtgaaaaacaagagaacgtttactactacatcactacgctgaacgaaaactaccacatgccggcaatgccggaaggtgctgaggaaggtatccgtaaaggtatctacaaactcgaaactattgaaggtagcaaaggtaaagttcagctgctcggctccggttctatcctgcgtcacgtccgtgaagcagctgagatcctggcgaaagattacggcgtaggttctgacgtttatagcgtgacctccttcaccgagctggcgcgtgatggtcaggattgtgaacgctggaacatgctgcacccgctggaaactccgcgcgttccgtatatcgctcaggtgatgaacgacgctccggcagtggcatctaccgactatatgaaactgttcgctgagcaggtccgtacttacgtaccggctgacgactaccgcgtactgggtactgatggcttcggtcgttccgacagccgtgagaacctgcgtcaccacttcgaagttgatgcttcttatgtcgtggttgcggcgctgggcgaactggctaaacgtggcgaaatcgataagaaagtggttgctgacgcaatcgccaaattcaacatcgatgcagataaagttaacccgcgtctggcgtaagaggtaaaagaataatggctatcgaaatcaaagtaccggacatcggggctgatgaagttgaaatcaccgagatcctggtcaaagtgggcgacaaagttgaagccgaacagagcctgatcaccgtagaaggcgacaaagcctctatggaagttccgtctccgcaggcgggtatcgttaaagagatcaaagtctctgttggcgataaaacccagaccggcgcactgattatgattttcgattccgccgacggtgcagcagacgctgcacctgctcaggcagaagagaagaaagaagcagctccggcagcagcaccagcggctgcggcggcaaaagacgttaacgttccggatatcggcagcgacgaagttgaagtgaccgaaatcctggtgaaagttggcgataaagttgaagctgaacagagcctgatcaccgtagaaggcgacaaggcttctatggaagttccggctccgtttgctggcaccgtgaaagagatcaaagtgaacgtgggtgacaaagtgtctaccggcagcctgattatggtcttcgaagtcgcgggtgaagcaggcgcggcagctccggccgctaaacaggaagcagctccggcagcggcccctgcaccagcggctggcgtgaaagaagttaacgttccggatatcggcggtgacgaagttgaagtgactgaagtgatggtgaaagtgggcgacaaagttgccgctgaacagagtctgatcaccgtagaaggcgacaaagcttctatggaagttccggcgccgtttgcaggcgtcgtgaaggaactgaaagtcaacgttggcgataaagtgaaaactggcagcctgattatgatcttcgaagttgaaggcgcagcgcctgcggcagctcctgcgaaacaggaagcggcagcgccggcaccggcagcaaaagctgaagccccggcagcagcaccagctgcgaaagcggaaggcaaatctgaatttgctgaaaacgacgcttatgttcacgcgactccgctgatccgccgtctggcacgcgagtttggtgttaaccttgcgaaagtgaagggcactggccgtaaaggtcgtatcctgcgcgaagacgttcaggcttacgtgaaagaagctatcaaacgtgcagaagcagctccggcagcgactggcggtggtatccctggcatgctgccgtggccgaaggtggacttcagcaagtttggtgaaatcgaagaagtggaactgggccgcatccagaaaatctctggtgcgaacctgagccgtaactgggtaatgatcccgcatgttactcacttcgacaaaaccgatatcaccgagttggaagcgttccgtaaacagcagaacgaagaagcggcgaaacgtaagctggatgtgaagatcaccccggttgtcttcatcatgaaagccgttgctgcagctcttgagcagatgcctcgcttcaatagtagcctgagcgaagacggtcagcgtctgaccctgaagaaatacatcaacatcggtgtggcggtggataccccgaacggtctggttgttccggtattcaaagacgtcaacaagaaaggcatcatcgagctgtctcgcgagctgatgactatttctaagaaagcgcgtgacggtaagctgactgcgggcgaaatgcagggcggttgcttcaccatctccagcatcggcggcctgggtactacccacttcgcgccgattgtgaacgcgccggaagtggctatcctcggcgtttccaagtccgcgatggagccggtgtggaatggtaaagagttcgtgccgcgtctgatgctgccgatttctctctccttcgaccaccgcgtgatcgacggtgctgatggtgcccgtttcattaccatcattaacaacacgctgtctgacattcgccgtctggtgatgtaagtaaaagagccggcccaacggccggcttttttctggtaatctcatgaatgtattgaggttattagcgaatagacaaatcggttgccgtttgttgtttaaaaattgttaacaattttgtaaaataccgacggatagaacgacccggtggtggttagggtattacttcacataccctatggatttctgggtgcagcaaggtagcaagcgccagaatccccaggagcttacataagtaagtgactggggtgagggcgtgaagctaacgccgctgcggcctgaaagacgacgggtatgaccgccggagataaatatatagaggtcatgatgagtactgaaatcaaaactcaggtcgtggtacttggggcaggccccgcaggttactccgctgccttccgttgcgctgatttaggtctggaaaccgtaatcgtagaacgttacaacacccttggcggtgtttgcctgaacgtcggctgtatcccttctaaagcactgctgcacgtagcaaaagttatcgaagaagccaaagcgctggctgaacacggtatcgtcttcggcgaaccgaaaaccgatatcgacaagattcgtacctggaaagagaaagtgatcaatcagctgaccggtggtctggctggtatggcgaaaggccgcaaagtcaaagtggtcaacggtctgggtaaattcaccggggctaacaccctggaagttgaaggtgagaacggcaaaaccgtgatcaacttcgacaacgcgatcattgcagcgggttctcgcccgatccaactgccgtttattccgcatgaagatccgcgtatctgggactccactgacgcgctggaactgaaagaagtaccagaacgcctgctggtaatgggtggcggtatcatcggtctggaaatgggcaccgtttaccacgcgctgggtagtcagattgacgtggttgaaatgttcgaccaggttatcccggcagctgacaaagacatcgttaaagtcttcaccaagcgtatcagcaagaaattcaacctgatgctggaaaccaaagttaccgccgttgaagcgaaagaagacggcatttatgtgacgatggaaggcaaaaaagcacccgctgaaccgcagcgttacgacgccgtgctggtagcgattggtcgtgtgccgaacggtaaaaacctcgacgcaggcaaagcaggcgtggaagttgacgaccgtggtttcatccgcgttgacaaacagctgcgtaccaacgtaccgcacatctttgctatcggcgatatcgtcggtcaaccgatgctggcacacaaaggtgttcacgaaggtcacgttgccgctgaagttatcgccggtaagaaacactacttcgatccgaaagttatcccgtccatcgcctataccgaaccagaagttgcatgggtgggtctgactgagaaagaagcgaaagagaaaggcatcagctatgaaaccgccaccttcccgtgggctgcttctggtcgtgctatcgcttccgactgcgcagacggtatgaccaagctgattttcgacaaagaatctcaccgtgtgatcggtggtgcgattgtcggtactaacggcggcgagctgctgggtgaaatcggcctggcaatcgaaatgggttgtgatgctgaagacatcgcactgaccatccacgcgcacccgactctgcacgagtctgtgggcctggcggcagaagtgttcgaaggtagcattaccgacctgccgaacccgaaagcgaagaagaagtaatttttcgtttgccggaacatccggcaattaaaaaagcggctaaccacgccgctttttttacgtctgcaatttacctttccagtcttcttgctccacgttcagagagacgttcgcatactgcactccgttgctcgttattcagcctgacagtatggttactgtcgtttagacgttgtgggcggctctcctgaactttctcccgaaaaacctgacgttgttcaggacttgcgctttgaacacgctggcgggcgttatcacgttgctgttgattcagtgggcgctgctgtactttttccttaaacacctggcgctgctctggacttgcggactgaatacgctcacgcgctgcgtctcttcgctgctggttctgcgggttagtctgcattttctcgcgaaccgcctggcgctgctcagggctggcggactgaatgcgctcacgcgctgcctctcttcgctgctggatcttcgggttagtctgcattctctcgcgaactgcctggcgctgctcagggctggcggactgataacgctgacgagcggcgtccttttgttgctgggtcagtggttggcgacggctgaagtcgtggaagtcgtcatagctcccatagtgttcagcttcattaaaccgctgtgccgctgcctgacgttgggtatctcgtgtaatgactggtgcggcgtgtgttcgttgctgaaactgatttgctgccgcctgacgctggctgtcgcgcgttggggcaggtaattgcgtggcgctcattccgccgttgacatcggtttgatgaaaccgctttgccatatcctgatcatgatagggcacaccattacggtagtttggattgtgccgccatgccatattcttatcagtaagatgctcaccggtgatacggttgaaattgttgacgtcgatattgatgttgtcgccgttgtgttgccagccattaccgtcacgatgaccgccatcgtggtgatgataatcatcattgtcatgatgatgatggtcatgatcgtcgtcgtcccagtcgatgctgctgaatagtgcgtacgtggtagcaacgcccatgctatagccgaatccgcgtacaaagctgtcaacaaacggttctccggctggtggtggcagataaaccggcggatacgcagtattggcccagttcccgtaaaccacggttgggttgtagttgggaatatagaccacatcaggattggcgggctcaatggaaatgacggttgttgccggctctgtaatgacggggttggcagttaaaactgtattggatggtatgacgggtgccgtgactgtctgttttaccggtacagctttcttcgttgtggtaataactttctgttcggtactactcttcaggctgccggtttgttgcgccagttgccgcaatcgctgtacgctgtccatcacgtcctgcggctgggccagaaaagcatcgcccaggttttgcacccattgcgggttttcgcccatcaatgccatcaattgtggaaaggccaccagacttttaacgctggcgtcccacggctggtcagataccgcctgaatagcagcatcgccttgtttaagtggattatcgtggctccattgcactgcttgagcaacgtttgtcggataggtacttgccatcagcacctggctaagtagggcgtcgggatacagcgcgacgggcgcgacccattgatctatttgtgcagtgctgaatgcggatttgacgacggcgggtgttacgggaggtgcggaaaccgttgcaggaaacgtaaccgcggcagcgtcagacacagccagttgtgtgctttgcggttccacaggcgcttccactgtgcggctttttatatatagcccggtagaggcggcacaaagcccggcactgcaaattagcgccagcacatggggtttaaacggcaaagtcattttcataattcggatctcaaggaaatcgcaatggtcggcgaactgccacccgcaggtgctgtgaatccgagtataaagaggcggtagtttaaattttgactaatcttgggattcgttgagaaaggtgattatcaccatgcgaattaacgaagtttttacggagggaaacaatctctagaccatccttaacgattcagccacttttttatgttgcttttttgtaaacagattaacacctcgtcaaaatcctgctattctgcccgttgcggtactgggcatttaccctacaaactgctgtctcacaggagcgtgaagagaatcgcctgccgcactatgacaatgagagcgaggagaaccgtcgtgctagaagaataccgtaagcacgtagctgagcgtgccgctgaggggattgcgcccaaacccctggatgcaaaccaaatggccgcacttgtagagctgctgaaaaacccgcccgcgggcgaagaagaattcctgttagatctgttaaccaaccgtgttcccccaggcgtcgatgaagccgcctatgtcaaagcaggcttcctggctgctatcgcgaaaggcgaagccaaatcccctctgctgactccggaaaaagccatcgaactgctgggcaccatgcagggtggttacaacattcatccgctgatcgacgcgctggatgatgccaaactggcacctattgctgccaaagcactttctcacacgctgctgatgttcgataacttctatgacgtagaagagaaagcgaaagcaggcaacgaatatgcgaagcaggttatgcagtcctgggcggatgccgaatggttcctgaatcgcccggcgctggctgaaaaactgaccgttactgtcttcaaagtcactggcgaaactaacaccgatgacctttctccggcaccggatgcgtggagtcgcccggatatcccactgcacgcgctggcgatgctgaaaaacgcccgtgaaggtattgagccagaccagcctggtgttgttggtccgatcaagcaaatcgaagctctgcaacagaaaggtttcccgctggcgtacgtcggtgacgttgtgggtacgggttctagccgtaaatccgccactaactccgttctgtggtttatgggcgatgatattccacatgtgccgaacaaacgcggcggtggtttgtgcctcggcggtaaaattgcacccatcttctttaacacgatggaagacgcgggtgcactgccaatcgaagtcgacgtctctaacctgaacatgggcgacgtgattgacgtttacccgtacaaaggtgaagtgcgtaaccacgaaaccggcgaactgctggcgaccttcgaactgaaaaccgacgtgctgattgatgaagtgcgtgctggtggccgtattccgctgattatcgggcgtggcctgaccaccaaagcgcgtgaagcacttggtctgccgcacagtgatgtgttccgtcaggcgaaagatgtcgctgagagcgatcgcggcttcagcctggcgcaaaaaatggtaggccgtgcctgtggcgtgaaaggcattcgtccgggcgcgtactgtgaaccgaaaatgacttctgtaggttcccaggacaccaccggcccgatgacccgtgatgaactgaaagacctggcgtgcctgggcttcagcgctgacctggtgatgcagtctttctgccacaccgcggcgtatccgaagccagttgacgtgaacacgcaccacacgctgccggacttcattatgaaccgtggcggtgtgagcctgcgtccgggtgacggcgtcattcactcctggctgaaccgtatgctgctgccggataccgtcggtaccggtggtgactcccatacccgtttcccgatcggtatctctttcccggcgggttctggtctggtggcgtttgctgccgcaactggcgtaatgccgcttgatatgccggaatccgttctggtgcgcttcaaaggcaaaatgcagccgggcatcaccctgcgcgatctggtacacgctattccgctgtatgcgatcaaacaaggtctgctgaccgttgagaagaaaggcaagaaaaacatcttctctggccgcatcctggaaattgaaggtctgccggatctgaaagttgagcaggcctttgagctaaccgatgcgtccgccgagcgttctgccgctggttgtaccatcaagctgaacaaagaaccgatcatcgaatacctgaactctaacatcgtcctgctgaagtggatgatcgcggaaggttacggcgatcgtcgtaccctggaacgtcgtattcagggcatggaaaaatggctggcgaatcctgagctgctggaagccgatgcagatgcggaatacgcggcagtgatcgacatcgatctggcggatattaaagagccaatcctgtgtgctccgaacgacccggatgacgcgcgtccgctgtctgcggtacagggtgagaagatcgacgaagtgtttatcggttcctgcatgaccaacatcggtcacttccgtgctgcgggtaaactgctggatgcgcataaaggtcagttgccgacccgcctgtgggtggcaccgccaacccgtatggacgccgcacagttgaccgaagaaggctactacagcgtcttcggtaagagtggtgcgcgtatcgagatccctggctgttccctgtgtatgggtaaccaggcgcgtgtggcggacggtgcaacggtggtttccacctctacccgtaacttcccgaaccgtctgggtactggcgcgaatgtcttcctggcttctgcggaactggcggctgttgcggcgctgattggcaaactgccgacgccggaagagtaccagacctacgtggcgcaggtagataaaacagccgttgatacttaccgttatctgaacttcaaccagctttctcagtacaccgagaaagccgatggggtgattttccagactgcggtttaaaaagtcagcgcacgcgctgcgcataaacgacacaatgcccggtgaatgagattcccgggcatttttttatttctaaaccatcgccgttccgctgtttttctccggtaaggctgcgataattacatcaatggcgcaatgcgatttcggtgcattgccgggagcagaggaacacactatggattacgaatttctgcgcgatattaccggagtggtaaaggtgcgtatgtccatggggcatgaagtggtcgggcactggtttaatgaagaggtgaaagaaaacctggccttgcttgatgaagtggaacaagcagcgcacgcactgaaaggtagcgaacggtcctggcaacgggcagggcatgaatacaccctgtggatggacggtgaagaggtgatggttcgcgccaatcaactggaattcgctggcgatgaaatggaagaggggatgaactactacgacgaagaaagcctgagcctatgcggcgttgaggattttctgcaggtcgtggcggcttaccgcaatttcgtgcagcagaagtaaataaatctggcggagcctgggagctccgccagagccgttaaacagctggcatattgcgcccgtaataaatctcgcgcatttctttccacagcgcagcggtaatttcctggcgctcgctgtcggttaagtcttccggtttggtgtggaacatgtagtgcttaaggtcgaactctttaagcaacatcttggtatggaagatattttcctgatagacgttcacatccaccatgtcatacagcgccttcatatcgtcagacataaagttctgaatgctattaatctcatggtcgataaagtgcttcataccgttaatgtcgcgggtaaaaccgcgcacgcgataatcaatggttacgatatcggactcaagctggtggatcaggtaattcagcgccttcagcggagaaatcacgccgcaggtagagacttcaatatcggcgcggaaggtacataaaccgccttcaggatgactttccgggtaggtatgtacgcaaatatgacttttatcaagatgggcaacgaccgtttctggcagtgggccggggtgttctgttttgtcgatgagtttcgggtcaaccggttcttcactcaccagaatagtgacgctggcaccctgtggttcgtaatcctggcgggcgatgttaagaatattagccccgataatggaacaggtttcactcaggatttcggtcagacggttggcattatagagttcatcgatataagcaatataaccgtcgcgctcttcggcagttttggcgtagcagatatcgtaaatacaaaaactcagacttttggtcagattattaaagccatgcagtttcagttttttcaatttcttatcttctccttaggacggctgactagccagtgcgtcttgcagatactgaggtaaggcaaaagctgccgtatggattgccggattgtaataacggcatttcaggccagaggcgagaaaacgcgcctgaataatttcggtactgagatggcgtaaggcgtcgttatctgtcgcccatgcaaaagtcatgataccgccgtaataggtcgggatcgccgcctgataaaagccaacgtcgctgaagtaatggctgagtttgcgatggctgtcgatggcttcttcctgctgtaaaaagcagacgccgttttgtgcgacgaagataccgccaggattcaggcaacgtttgcagccttcataaaatgcgctagtgaaaaggctttcgccgggaccgataggatcggtgcagtcggagataatgacatcaaaggtctggctggtttgattaacgaaattgacgccatcgtcgatcaccagcttaaagcgcggatcgtcgtagctaccggcgttatggttgggtagatactgacggcagaagcttacgacacccgcatcgatttccaccatcgtgatactctcaacgtttttatgtcgggttacttcacgcagcatggcaccgtcgccgccgccgataatcagcacatgtttcgcgtgaccatgggccagtagcggaacatgggtcatcatctcatgatagataaactcgtcgcgctcggtggtttgtactacgccatccagcgccattacgcgaccaaatgcagcgttctcaaaaatgatcagatcctggtgatcggtcttttcatgatacagaacgttatctaccgcaaagtactgcccaaactggtcgtgtagcgtttcatgccactgttttttttcggccatgggttgatacctcctttgttaacacccgtaaaaaaagggcgcaacataatagctaacattgaccgcggatgcacggtcaatatttctacaaaaaggtatcagggattatttgacgtaggcaagcaggcttaaggaatcgcgggccagggctttgcattttttagcgacgggaatgccaatgccgctgagatcgcggtagctgtcttcaccgagggctttcatgtcgaaggtgtcgtaattactgaggtcccactggttttgctgagcgaaaaagaccagtgcgcgacgaatttgcccgttaggtaagttctggtaaccacaatcgttcttcagaaagacaaaaactgccgttaaatcggccatatcttcggcttcagactcgctgagcgcgtaactgtttgcgcagacggccatcaggctgccgaataacactgttctgaaaaacgtcttcattgcttctaccaggggcttaaagaagataaacgttagcacactgcgagcgaggcgacgaccattattgtcgattaaattgtgtctgcggcttgaccttcccgtaaggggaaggactatgctcaacgtttgattttgtttcgcctgcttaagaataaggaaataactatgcaacgtcgtgatttcttaaaatattccgtcgcgctgggtgtggctagcgctttgccgctgtggagccgcgcagtatttgcggcagaacgcccaacgttaccgatccctgatttgctcacgaccgatgcccgtaatcgcattcagttaactattggcgcaggccagtccacctttggcgggaaaactgcaactacctggggctataacggcaatctgctggggccggcggtgaaattacagcgcggcaaagcggtaacggttgatatctacaaccaactgacggaagagacaacgttgcactggcacgggctggaagtaccgggtgaagtcgacggcggcccgcagggaattattccgccaggtggcaagcgcagcgtgacgttgaccgttgatcaacctgccgctacctgctggttccatccgcatcagcacggcaaaaccgggcgacaggtggcgatggggctggctgggctggtggtgattgaagatgacgagatcctgaaattaatgctgccaaaacagtggggtatcgatgatgttccggtgatcgttcaggataagaaatttagcgccgacgggcagattgattatcaactggatgtgatgaccgccgccgtgggctggtttggcgatacgttgctgaccaacggtgcaatctacccgcaacacgctgccccgcgtggttggctgcgcctgcgtttgctcaatggctgtaatgcccgtagcctcaatttcgccaccagcgacaatcgcccgctgtatgtgattgccagcgacggtggtctgctacctgaaccagtgaaggtgagcgaactgccggtgctgatgggcgagcgttttgaagtgctggtggaggttaacgataacaaaccctttgacctggtgacgctgccggtcagccagatggggatggcgattgcgccgtttgataagcctcatccggtaatgcggattcagccgattgctattagtgcctccggtgctttgccagacacattaagtagcctgcctgcgttacctagcctggaagggctgacggtacgcaagctgcaactctctatggacccgatgctcgatatgatggggatgcagatgctaatggagaaatatggcgatcaggcgatggccgggatggatcacagccagatgatgggccatatggggcacggcaatatgaatcatatgaaccacggcgggaagttcgatttccaccatgccaacaaaatcaacggtcaggcgtttgatatgaacaagccgatgtttgcggcggcgaaagggcaatacgaacgttgggttatctctggcgtgggcgacatgatgctgcatccgttccatatccacggcacgcagttccgtatcttgagtgaaaatggcaaaccgccagcggctcatcgcgcgggctggaaagataccgttaaggtagaaggtaatgtcagcgaagtgctggtgaagtttaatcacgatgcaccgaaagaacatgcttatatggcgcactgccatctgctggagcatgaagatacggggatgatgttagggtttacggtataaaaagaccgtattcggaaatatgcccggatctctccgggcattaaactgatgacaaacgcaaatctgcctgatgcgctacgcttatcaggcctacgctagctgtgcaatccattgattttgcacaattttgtaggctggataaggcgttcacgccgcatccggcatgaacaacgcgcacgttgtcagcaatctgagcaagtcttacttcacatcatccggcagcgcataagccacaatatagtcgcccatcttcgtaccaaaactaccgtgaccgcctgcggagatcaccacatactgcttaccattcacttcataggtcattggcgtagcctgaccacccgctggtaaacgaccctgccacagtttttcaccgttgctcatgttgtaagcgcgcaggtagttatctgccgtagcggcgataaacagcacgttacccgccgtggagattggcccgcccagcatcggcatacccatattgaacggcaccggaaccggcatcgggaacggcatactgtcctgcggcgtaccaatacgtttcttccacaccacttcattagttttcagatccagcgcgctgatataaccccatgctggctgtttacatggcagaccaaatggactgaggaacgggttgagcgtgacaccatacggtacaccgtactgtggctgaatgccggattccgtacccgtgcctttggcatctttcggctgctccatcgggttgccaggaccacgcgggatcagtttgctaacaaacggcagtgccattgggttggcaatcgccacttcacgatttggatcaacggaaatcccgccccattcgaacatccccaggttacccgggaagaccagcgtaccctgttcagatggcggggtgaaaatgccttcatagcgcatctggtggaacatcacgcggcacaccagttggtcaaacatggtggctccccacatatccgcaccgctcaaatctttcgtcggacggaagctcagttcagaaaacggttgagttggggttacgtaatcgcctttcgctgcaccttggggaaccggtttttccggtgccggaaccaccagttcgccattacgacgatcgagcacaaaaatgttgccggttttcgccggagcgtaaataactggcactttctgaccattaacggtgatgtccgccagcgtcggctgtgccggaagatccatgtcccacaggtcgtggtgaacggtctggtagctccacgccagtttcccggtagtggcattcagcgccagaatgctgctggcataacgttcctgttccggtgtgcggttaccgccccagatatccggcgtggtcacgcccatcggcagatagaccagatccagcttcgcgtcataggccgctggtgcccaggagtttgggctgttaaaggtaaaggtgtgttcgtcagacgggattgcgttcggatctttcgcgccgggatcaaaagcccacagcagctccccggtgttgacatcaaaaccacggatcacgccagacgtttcgcgggtactgaagttatcggtaacactaccggccatcacgatggttttatcggtgataatcggtgggctagtcggttcatacagacccggtttggtgtctggcatattgctttgcagattgagcacgcctttattggcgaaggtttcgcacagtttgccgttttcagcgttaatcgcaatcagtcgaccatcattgaccggaagaatgatacgacgcgggcaatccgccatcacttccgggctagcggtttctgctttggcttcatgataagagacaccacggcaggttacgtgctggaaagactcgttggttttcagctcaggatcgtaatgccatttctctttgccgctggcggcatcaagcgcaaacaggcgctggtgagcggtacacaggtaaagggtgtcgcccactttaatcggcgtcacttcattggtgatttcacccggatcgttcggctgcttcacatcgccagtacggaacacccaggcttctttcagattatggacgttatcggcgttaatttgtttcagcgggctaaagcgttgaccttcctgattacgaccataggcaggccagtcctgatcggctacgggggagatagcttcagcaggtgtggcatcggcgcttaaggtgccgttgatctcctgcggatcgttaaatccggcccaggtcaggataccaccgctaatcagcagtgcgaccaccagtgcggcaactgcgccgctggcaggaatgaccaggcgacgccagacaaacggcaggatcagccagatgccgaagaagaccagaatgtcgctgcgcggagtcagcgcccagaagtcgaaaccaacttcccagacgccccaaatcatggtgccgagcagcagggctgcgtatagccaaagcgcggcgcgtttactgcgccacagcatccaggcgacgccgagcatcacaaggccagcgatagggtagtaccaggagccgccaatcgcgaccagccagcctccgccaatgagtagatacagcccgcaaagcgctgcaaaaagggctgttagcgtgacgagtaatcgtcggctgcctgtattgttaattgccataaagagacaccatttcaattcattaatattttagtagcaattaattataggttttaacatgtgtgatcgtcatcacaattcgagctttattaacagattccgcgaatgaatagttttactggtatactgcgtgtcttgcgctttgttgcggtgccaaaacctgcccgtgcgaagtgatttgtttttaaatcatatggttagagatatgaaacatactgtagaagtaatgatccccgaagcggagattaaagcgcgtatcgccgaactgggtcgtcagattactgagcgttacaaagacagcggcagcgatatggtgctggtgggtctgctgcgtggcagttttatgtttatggcggacctgtgccgtgaagttcaggtatctcatgaagtcgactttatgaccgcctccagctacggtagcggcatgtccaccacccgtgatgtgaaaatcctcaaagatctggatgaagatatccgtggcaaggacgtgctgattgttgaagatatcatcgacagcgggaatacactgagcaaagtgcgtgagatcttaagcctgcgcgaaccgaagagcctggcgatttgtacgctgctggataaaccgtcccgtcgtgaagtgaacgtcccggtagaatttatcggtttcagcatcccggatgagtttgtggtgggttacggcattgattacgcacagcgttaccgtcatctgccgtatatcggcaaagtgattctgctggacgagtaagtgtgaagttgccggatgtgttgcatccggcatggcatttttatttgtggttggcgtgtttcagcttgaggttggaaatcccgtgacggtaacgttgctcaagggtttcgcggttggtggcggtaacatccagatcacgcagcaagccgtcgtgaatgccgtaggcccagccgtgaatggtaactttctgcccgcgtttccacgcactttgcataatggtggagtggcccaggttatacacctgttccatgacgttcagttcacacaaggtatccagacggcgctcttgcggcatttcgccgagcaaactgctatgtttgaaccagatatcgcggatatgcagcagccagttgttgataagccccagttccgggttttcaactgcggcttgtacgccgccgcaaccgtagtggccacagataataatgtgttcaacttcgagtacatccactgcatactgaaccacggaaaggcagttcaggtcagtgtgaatgaccaggttagcaacattacggtgaacaaagagttcgcccggttcaagaccggttaaacgttctgcaggaacgcgactgtcggaacatccaatccatagaaagcgcggtttttgcgcttgtgccagtttctcaaaaaacccgggatcctcttccaccagcattttactccatagtgcattgttgctgatgagtgtatctatgtctttcatggaggttaacgacctgtaaccaaataattacgtttggctaatatagggcaactccgggacgatttaaaccacagataaagtgtaagaacgtaaggtaagtaaaaatttatgaccattgcactggaacttcaacagcttaaaaaaacctatccaggcggcgttcaggcgcttcgtgggatagatttgcaggtcgaagcgggtgatttttatgcgcttctcgggccgaacggggccgggaaaagcaccactatcggtattatcagctctctggtaaataaaacctccgggcgggtcagcgtatttggttacgatctcgagaaggatgtcgtgaacgctaaacgtcagttgggactggtgccgcaggaatttaacttcaacccgtttgaaaccgtgcagcaaattgtggtgaatcaggcagggtactacggcgtggagcgcaaagaagcgtacatccgcagcgaaaagtatcttaaacaactcgatctatggggaaaacgcaacgaacgtgcgcgtatgttatctggcgggatgaagcgccgtttaatgattgcccgtgcgttaatgcatgaacctaaactactgattctcgacgaaccgaccgcaggcgtggatattgaacttcgccgcagtatgtggggctttttgaaggatttaaacgacaaaggcaccaccatcattctcaccacacactacctggaagaagcagaaatgctgtgccgcaatatcggcattattcaacacggtgagctggtggaaaataccagcatgaaggcgctgctggcgaagctgaaaagcgaaacctttattctcgatctcgcaccgaaaagcccgttaccgaagctcgatggctatcagtatcgactggtcgataccgcgacgctggaagttgaagtgctgcgtgagcaggggatcaacagcgtatttacgcagttaagtgagcagggcattcaggtattaagtatgcgtaacaaagctaaccgtctggaagagctgtttgttagtctggttaatgaaaaacaaggagatcgcgcatgatgcatctttactgggtggcgctaaaaagcatctgggcgaaagagatccatcgctttatgcgtatctgggtgcagacgctggtgccgccagtcatcaccatgaccctttactttattatcttcggtaacctgattggtagccgtattggcgatatgcatggcttcagctatatgcagttcatcgtaccggggctgatcatgatgagcgtgatcaccaatgcctacgccaacgttgcgagtagtttttttggtgccaagttccagcgtaatattgaagagctgctggtagcgccggttccgactcacgtcattattgccggatatgtcggcggtggcgtggcgcgtggtctgtttgttggcattctggtgacggcaattagtctgttttttgtgccatttcaggtgcatagctgggtattcgttgccttaacgctggtgctcacggcggtgttgttctcccttgcgggtttgctgaacggtgtgtttgccaaaacgttcgatgacatcagcctggtgccaacctttgtgttaacgccactcacgtatttgggcggggtcttttacagtctgactttgttgccgccgttctggcaagggctgagccacctgaacccaatcgtttatatgatcagtggtttccgctacggcttcctcggtatcaatgatgttccgctggtcactacctttggcgtactggtggtctttattgtggcgttttatttgatctgttggagcctgatccaacgtggacgtggtttgcgtagctaaggctatttcctctcctctggatttgggggagaggagttttgacggctatcaccctttatcaacaatggtcagggtagactgattttcggctaaggaggaaggcgatgttaggttgggtaattacctgtcacgatgaccgggcgcaagagatactggatgcgctggagaaaaaacatggggcacttcttcagtgccgggccgtgaatttctggcgcggattaagctctaatatgctcagccgcatgatgtgcgatgctctgcatgaagcggactctggtgagggtgtcatcttcttaaccgatatagccggagcgccaccgtatcgcgtggctagtttattaagccacaaacactcccgttgcgaagtgatttctggtgtcacgttaccgttaattgaacagatgatggcttgccgtgaaaccatgaccagtagtgagtttcgcgagcgtattgtcgaactgggtgcgccggaggtgagtagtctttggcaccaacaacaaaaaaatccgcctttcgtcctcaaacataatttgtatgagtattaacccgcgattctgatggcgcttttgctacaataaaagcgttgtttcaccctcggttattttttcatgtacaaacaagctgttattctcctgctgatgctgtttaccgcaagtgtcagtgccgcgttacctgcccgttatatgcaaaccatcgaaaatgctgcggtctgggcgcaaattggtgacaagatggtgaccgtggggaatattcgggccggacaaatcattgccgtggagcccactgccgcaagttattacgcatttaattttggctttggcaaaggttttatcgataaaggtcatctcgagccggttcaggggcgacaaaaagttgaagacggtttgggcgacctcaacaagccgctgagtaatcagaacttagttacctggaaagatacgccggtctataacgcgccgagtgcgggaagtgcgccatttggggtactggcggacaatttgcgctacccgattttgcataaactgaaagacaggttaaatcaaacctggtatcagatccgtattggcgatcgactggcctatatcagcgcactggatgcccaacccgataatggcctgagcgtgctaacctatcaccatattctgcgcgacgaagaaaacacccgttttcgccatactagcacgaccacaagcgtacgcgctttcaataaccagatggcctggctgcgtgacaggggatacgcgacactgagcatggtgcagctggaaggctacgtgaagaataagatcaatctccctgcgcgagcggtggtgattacctttgatgatggcctcaagagcgtgagccgctatgcgtatcctgtgttgaaacaatatggcatgaaggcgacggcgtttattgttaccagtcgcatcaaacgtcacccgcagaagtggaacccaaaaagcctgcaatttatgagcgtttctgagcttaacgaaattcgcgatgtatttgatttccagagtcatacccattttttgcatcgggtagatggttatcgccgacccatattactgagccgtagtgagcacaatattctgtttgattttgcacgtagtcgccgcgctctggcgcaatttaatccgcatgtctggtatcttagctatccgtttggcggatttaatgacaacgccgtgaaggcagcaaacgatgccggatttcacctggcggtgacaaccatgaaaggcaaagtaaaaccgggggataatccgttgttactaaaacgactttatatcttaagaacggatagcctggagacgatgagccggctggtgagtaaccagccgcagggataacaatcaagcaacctgtaccggaatcgctttcgcggtacgtttcatttcattgtcgccttcaaaataggcgacgttgggtcgccaggtgcgagcttcttcatctggcatggtaacgaagctggcgatgatgacaatatcgccgacactggcgcagtgggccgccgcaccgttaacagaaataattctgctaccgcgttctgccgcgatggcataagtggagaaacgcttgccgttggtgacattccagatatcaatggcttcgttttcgagaataccggctgcgtcaagaaaatcctggtcaatggcgcaagaaccttcatagtgcaggtccgcatgagtcactttcacgcggtggagtttgccctgcagcatcgtgcgaatcataacttctacctttctaccctgtcgttaacgaagcaggcgatgcctgctttgaggaaattctcacgcagtattgcccgatttttgtttagtgtctactcatctgacggcatttgcgtcagcagtttgcgtaccgcgccgaagcgtgccatgtatcgcctgtaacgaattgatatttctctgaacgctgctcggtaaacaataaagaggtggctgacgatagcgcgccttgactggatactgccttcacgcaaagccacacggaagacagggaagatggatgcaccgagtaccacaccgcatgacgcggtatttaaacaatttttaatgcatgcggagacggctcgcgactttctggagatacatttgccagtggaattacgcgaactttgtgacctcaacacgcttcatttagagagcgggagtttcattgaagagagcctgaaaggacacagcacggacgtgctctattccgtgcaaatgcagggcaatcccggttatctgcatgttgtgattgaacaccaaagcaagccggataagaaaatggcctttcgcatgatgcgttattctatagccgccatgcaccggcatctggaggctgaccacgataagctgccgctggtggtgccgatactgttttatcagggcgaggccacaccttatccgctaagtatgtgctggtttgatatgttttacagcccggagctggcgcgacgcgtctataacagtcctttcccgctggtggatatcaccatcacaccggatgacgaaatcatgcaacatcggcggattgcgattctcgaactactgcaaaaacatattcgccagcgcgacttaatgttattgcttgagcaactggtcacgctgatcgacgaagggtacactagcggaagtcagttagttgccatgcaaaactatatgctgcaacgcggtcatactgaacaagcggatttgttttacggtgtgttgagagacagggaaacgggaggggagtctatgatgacgctggcgcagtggtttgaagagaaagggattgagaaggggattcagcagggaagacaggaagtaagtcaggaattcgcccagcgtcttctgagtaaaggaatgtctcgggaagacgttgcagagatggcaaatttacctcttgctgagattgataaggtaattaaccttatttaagttacctgtgttatgacagatgacgtggggtaaattaataactggcgccatcagccgtagcgccagttaagtattacgccagctcgaccattttgttgtcgatcaggcgagcatcgccaagccaggcggctaccagaattactgcccgtttgctggtttcagaaacttccagcaatgtgtcggcatcgcgaatctgaatatcatcggcgcggaagcctttttcattcagttcttgccccgcaatggtaataatttcatcgagatcccgttccccagcctgcaatttgtcagcaatgctacttaaaactttgtacagaccaggcgcaattttgcgttgttccgccgtcagataaccgttacgggaacttagcgccagaccgtctttggcgcgcataattggcacaccgacaatctcaatatcgaagcccatatcggcaaccattttgcggatcagcgccagttgctgaaaatctttttcaccgaagcaggcgatgtccggctggaccaggttgaacagcttgctgacaatagtgctaacgccgcgaaaatgtcccggacggctggcaccttccagcatggtgctaaggccaggaacgtcaacgtaagtgtgggtttcagtaccgttcgggtagatctcttttacgctaggggcgaaaactaaatccactttacgtttgtttagcttctcgcagtcctcctgcaaggtccgtggataacgagccagatcttccgggcggtcgaactgcatcgggttaacgaaaatactgacgacgaccacatcggcgcgggctttggcttcgtcgaccagcttcatatggccatcgtgcaggttacccatggtaggcaccagcgccacgcgcttgccttccatacgcaggcggcgaatttgctgacgcagcagcggcagggtttcgataattaacacaacgtgactccttaatggaaactgtgttcttcgcccggataaacgccggactccacttcagccatatactgccgcacagccgcgcggatgtcgcccgtttcggcgaggaaatttttagcgaatttaggaatgtgaccgccggtaataccaaaggcgtcgtgcatcacgaggatctgcccgtcagtgacgttgcctgcgccaatgccaataaccgggatcgccagtgcttcggtaatacgttttgccagttcaaccggcacgcattccagcaccagcagctgtgccccagcagcttctaaggctaatgcatcgctgagcagttgatcgcccgcttcatcgccgcgcccctgaactttgtagccaccgaaaatattcacactctgtggtgttaaacctaagtgaccacatacaggaacggcacgttcggtcagcatttgtacggtttctaccagccactcaccgccttcaattttgaccatgttagcaccggcacgcataaccgttgcggcgttttcgaaggcttgttccggcgtggcatacgccataaacggcaggtcagccagcagcaggcagtttggtgcgccgcgacgtacggcggcagtgtggtaggcgatatcggcaacggtaactggcagggtggagtcgtgcccctgaaccgtcatgcccaggctatcgcccaccagcatgacgttaagcccttcatcagcaaagagtttggcgaagctatagtcataagcggtgatggtcgcgaaacgttttttttcctgtttgtacttctgcagtaaggagatggtggtcggtttcataacgtatcctgataaattgatgttgtgctgtctggcattttatcagtcacattggtgggggcaatgatttatccgtagcagcactgccagaaggtgacagtgctgctacgttatcagggataggttacctggaaagtactggtggctttaaattcgccgggttcgatagcaatattcccgtcttgctttaatgttgcctggaaatgaagaggctgacttgtgccgttaccttgattagggtaaaccccatcggaggtgtcatcttcggtttcataatctatataaacagaattcgtatcattaggttttaatgtcattagcggatttttactggttgctaaaccttcaatgagtacgccaacgcctttggcggcagtgcttccagtaagcgtattaccaagcagttgtgtgttttgagtacctacttttccagtgacgagttttgtttcaatattacgcacacgaatacaattctgaaggctgatatcaaagggaacaggactagcgccatttttaattgtcccagagctatattctcccattctaaccgtactaccattgacacttggcccggtaagtatggaggtaaaacatgttggtaaggttaatttgacattattcagtgtgaaattgacataaatgtggttgctgtgatctacaacttttgtaccaggactgtaggccttaaagctataaaggtaattactactactggataactggacttgctgattaagtgtaggatcgaaattagtatctgtataaaattcaacagttatgttgtgtactataccaccaatagcccaaaacttatcgtagtcgtctgctttgttgcaacccttagtttgtagatcgctgtctgtgacggaaaagaaaaattcttggttggaaggatctccgatatagattcctgggctttgaatgtcagttattgtatcgtatgcagaccagaccctacttattaacatggtgtaatacagaccaggaacagatgtattaaatagtttatgtccgccataatctttaccactatagaccatggcattttcaatagttattggaccaggattcgctctgccagatgtattgcagtaaagaataccaccaccggtacctgtatccaggtaactccagtacatttttaccccagtcgggccgagctgcgtgggtttataaaaaaccaagttgcttgctgtacttgtgtaattaaaggtcatctgtgcggcagtggaggggcctcgatagttatcaactcctgcattatttcccacaataaaacttgtatatgcactgactgtattacaacaagaatacagtgctaaaaaaagaatgtacctgaagatagtcttcatttttactccaatgtttctttattgttatggtttgcgctgtttttgtttgttattcgtagtaaatatccactaacacatggctcataagttgaccagatgtaacactcaatgcaggatcgattttttgcattcgggtgctaaatttccaggaactaccattcatgtcatcgctcattactggataaacggaacgagatccgccactagcattaagaacattgaatgtattcgcgctatcctgagtagaaaatataactactcctacattacttgctccactgctaatttcattagcaaatatttgcctagagccagcagccatgacaccgctaagggctctaaaatcaatatgtaactgatttagcacatcgccagttccctgtaatgcacagtcggatacagtgatagtgaactcttttccacctggttgataactttcaggagtaacattaccactaaaatatcccaccccaacgacgccaagatcaatattaccctggttactgattccgcttttgcaggtgctgttttttacattggcaacaaggtcaatatcctgtccagcaatggctggacaggcgatgcaaaacagtaaactcagaaacagaattattctcttcatcagcttacgttgagtgggatgcatatatagttcctgaatctgtaagtctgttagttataggttactgtaaatgtggctggtgcagaaaacttacccgcagtgacattgtttacggttttatttttttccacgaccaggcgtgcactcatcggataataaacgaccgcattggctgcagtggagattgttacctcttgacttgctggtgttacacagctaaattgtgttgcactccctgttgccggagttacagtgctccagacttcaacggcgacagcacttgctttatctgcggctgtggaaccatttgcaaaccccgcaccgtcattagcagttccctcgcatgtggctcgcttggttaattttatttgcgcttttttattggggatacccgcacagtctttgaatttgagtttgaatgtttttactttggtcttggcattgatttcagaaatatatacatcaccaaaatcaacaacagaaatgtcctgatcagagtcatttactaatgtagcggtacaagtacccatttctacagtagtaataacggtcagtccaatactgtctgttgccgcataagagagtacgctgaacaaactggcagccaaaacgacactgctggataatccataacgtaaatttttaaatgtcatcataattatccttcttattgatagatgaaattaaacgtcgccagtgcacgaaaattccccggtacgccttgccctgcatctgtttcacgtagcgcaacggtcatttcaagacccttatcgggctgcatctcgtctgtgctccagcgtatcttttccgcactgttaggtttaaggaaagtggcatcatcagtagtccgttttttgaaacccataccgatattacttgtcgtgctagaactatcaccagactgcggtataataagcttaggactgctactacttgcatttccggtcagagtggtatcaatccaactgatgccactgctgcacccactggcaaccagtttaaaatcagcctgagattctgtcgttttattcgcgatcttatccagacccatcttagggattctcaatgtgtagttattattgccatcattcgtgacgttattaccagtaagtgtgatgttacaggttgtcgctttgacagtggctgtaaactctacattaatatccgttgcaaatacactgggacttaataatattcccatcagtatcactattttatgtggcgttgtttttatcatttgacgtcccttgtagttactgaatctgacaccgaattccattcagaataatagattgtgctattttttctgcttctgggctttgttgataatgcgcaagacaacttacgggtttactttgttcgagccatttaatgctgatatttccctgctgctcaataccacgaacaaatgcttgtccaccctgtccaacattaccaatgacattgccttgctcatcataaatatctgcagcaaatggaatatttttaccatcacttcgtgtgatgttcataatggcactttgcccttgcacggtttcaaaatcagcaaagacgacactaccctgacgcggtacagctactgcactggtactttttaattcaacatcgttctcaagatcgttgatatccagcgcgatacggttttcatgataaggagaaagagcgctggtgacaccataaccccatcgatcgatagtactgttgccataatttattcgcgctccttgagcacctggagcctgaactaccgccagtgtatcggagtcgctaaaactatcattactgaaagtcagtccaccgctatgcaatacaaaaccaccgtcggtgctgagagaaacttgacggctgttatcgctatttgcagaaatactacctgccagcgttccccatggactctcatagctggcataacccccaacataactcaaatctttgctggctttattcatcgtatagccagtattcacgctataactgacgcgagcgttatcgctatagccactgctgctaacgttgagttggttattacccttaaagtcactgcttatttgagtatcaatactctggaaaccactagtacgttgttcagtgccaagtaatttttcaattggaatggtgaaactaagataaacgctatcgtcagtgtcgccgtcttcattccaactacgctgggcactgacactgtagctgccccaggatgtactgttactgtagccaatagagtaattgctacgattttgtccggaagcccagtaatcggaccaacttccggaaagataaaaactaccgtaatcttttttctcaaatttcaacggttggttaatactgaccgtaacctgatttttcatgcgactgtaattacgcatggatttcggttcaagatcttgttcgggatgtttcacttcatcaattagagttagtgcatcattaagaccaaggtaattctgtgtgctatagcgataggccgcgatattcagactagtacttgtttcttcgaataacttgttccaggaaacacgataactttgcccctggtatgttttatcatccgggatacgaacattggaatgagtcacatcgaaagaaaatgcaccaacactagtattcagaccaagacctaacaaaccagcggtatagttattatcggttatctgaataccggtataacccgtcagatagttattcaggccgtagtagtagcttgcttgaaataaattaggctcatcctgaatatcatcttttaagacctgaccgccgctaatatcccaacgtccaacgccagggcgtaacatttgaacaacggaactgaaaggttggctgaatgtccgcttactgccatcggattcttcgatggtaacaataagatcgctgccgtacccactcggactcagatcatcaatgacgaaagcgcctggcggcaccgtcgtttcataaatcttatagccaccttgcgtaatagtgactttggcgttggtattggcaacgccatgaatgataggcgcaaagctggctaaagtcggaggcaacatgcggctgtcactgtataaacgaatgcctcggatactgacggaatcaaaggtttcgcccgtcgtataagactcaccaagaatgagttgagaacgcaggctggcgatatcacgctgaacataccgattcttaaaatcataattactgccagaatcggtcatccagttgtagttgccgctggcacgcagtcgccatgcacctaaattcatcccaccgttaaatgcagcataaatgctttcattttttcgaccaggggtttcactatgatatccgttgaggttgtaactcaacatggccgcattaatgccgttttcccataagcttggatcaacatagttttggtaatttttcattacccaggcttgaggaacgtctatatccagacgttgatcgttaacgtcataacgaacagaagcctgagggataatttccgtcaaattgaggcaattgccgagcgtttcatccctggcaagcagaacggctttttcgttatttatatcgggagaattaatatgaaactgcaataaattctttaatgtgatacaagcctgggcgttcttttttccttcaattgcgacaaatgtaatactttggttaatgattggttggtcgtttacataaacactgacgtcgtaaacacccggtatagcggggttaccttcactgtaccggctgagatcaatattagatgcattctgccccatcaggaaggtatggtcatattcaacgagttcagcactgaaagcagtattgcaatacagcagcgcgcaaaacgtggcgatacgggtcagatgatgataatttttagtatattctatagtcacgctatgcttcctgcggaattatatccttgcctgattacagcctggcattaccttcaattgcgccaccaaagtcattaatggcgtaaaaatgcacttttgcagaattcgctttgccattaaggccattgactttcatgacctcatcactaaatggtgcaatcattttcacatcaatcggatagcgtttaccgctagcttctaaatcaccactgctaaaagagacgtagtaaggggttggattggtcactcgtaaactcgccttaccttcactaccactccagaaccacttcagggctaacggggcttcagagggatttcccttcaatccatccgggcgatagaaaagttttatacgtgtgcgaaatgccagttgcagcaggctttgattcgcgaccttttctgcatctggttttggtggaacttccagtacgttaaaccagaacacgctctctctgtctttaggcagactggtgctggctgtgtacattaatttgattgtttgcccacgtttggcatcaatacggcttactggcggcgtagcagtaaaagggactgtaatactgccaggctcagcgttgtcatcgccagtatctaaccaactctggacaagcaacgggttattccctttattttccagacgtacgttgacacttttttgatcgcttttatatattacgcgagtaccgctaatgacaatgtccgcaatagagctactactaaaagccatacaggttacgaagcataaagctgttgtatgtttggtgttaaaaaacataaaccatccctgatagagttaattaaaacagggaataatataaaatagaaattattattccctgtatattcattcaatcaatttaactggtgaatacttactgataagtaatggtgtatgcagtgttagtttttacataaccagcagttgctgtttggtctgcgacggcacgaacgtaagacgctttaaaatcataaacagcagattttgtcgttgcatccagggctttagtatacacatcgccagggttgttaatttgaacctgtttgatagtggaaccatcaatattgtgtagagcgatattaacgccgtcagatgggttgttaatagacatgtcgttgttcaaagtccctttgctgttaccaaagaaaacagaaccgaaggtcattttagccgtgctacctggattcggatttgctttgctgcagtcaacggtgatgctgaaaggtttagctttagcgccaacggtgtcattcagtacgccagcatcgatttcaccaacggttgcggtttgcagcaggatcagaccatccttgttaccgccgtcaacgcgggtttcacaggtgttatcaacaaccagaccactgatatttaactgaccgccgtccatatcagcagaagcagtacctgcaaccatcgccagcataagaccagacagggcaaaacctaattttttagacataaaaatcctttaataaaattccattagtcagactacatgtttgaagaatgactattcatgacacaaataggagaaacaaatgttagatattaatgagcaatgatatttgttacccaaatttacaaccattgttcattaggtcgcctattgtgcactttagaagcttttgaacaaattaaatttacttaattcaaaattaagtaaaaataagttcacaagtgcaattggttagggtatggagatgggattgatatttatttataggaagttatattatttccgcaaagagatgtttaaactaaaatcgtaattaaggaaagagatgagatatgattttcagaaaatatttatattcgcaatataaataaattaccatttgtttaatttgtcaaatgctcttgtatgtaagatttgacgcaacatctccccatcaggaaacaccaactccggcgcgatttcaaacagcggccacagcataaatccacgattcttcatatcgtagtgcggaacggtcaggcgttcagtatttatcacttcattaccaaacagcatgatgtcgagatccagcgtgcgtggtccccagcgttcagctttgcggacgcgaccttgctgcaattcaatacgctgtgtgtgattgagtagctcttcaggtgcaagagaggtttccagcgccacggctgcgtttaagtaatcgggttgatcttgcggccccagcggtggggtgcggtaaaagctagaaacggtaagaatgtggctttcagggatatcgcctaatgctttcagggcagcattgacctgctccagcggagaggccagattgctgcctatggcaatatacgccactgtcatgcggtaccctcacgacgtggtgcgcgtttgcgtggacgacgagtacgacgacgcggactcggttcttcatccagctcgttgagcatccctttttggtctggtggcgcggaaacctggaactcaccccaccatttcaccagacgctgcagttcagcgttacgctcaacttcagctcgcaaggccaacaggtcataagccgcacggaacttaggatgctccagcagtttccatgcgcgtttaccctgacgacgggacatacgcaactgcaactgccagatatcgcgggttaatgtcgtcagacgtttcgggattgccagactacggcaggcttcgtccagcacgtcgttcatcgccagcgcgaaagcgtcgtgataggtcaggccgctttcctgggcgatcttctgtgccgtctccagcagtgggtaccagaacatggcggcaaacaggaacgccgggttcacgcgcatatcgttatggatacgcgtatcggtattcttcagcacctgttcaatgatccgctccatcgggctgtcgccattttccgtgaagtagcgggtaatggtcgggaacagcggctggaacagatgatattcacacaacagcttataggtttcgtaaccgtagcccgcttgtagcagtttaaggctttcttcaaacaggcgtgccggtgggatatcgttcagcagggtagcgaggcgagggatcggttctgcggtttccgggctgatgcgcatacccaatttggcggcaaaacgtaccgcgcgcagcatacgtaccggatcttcacggtagcgcgtttccgggttaccaatcagacggataacgccgtccttcagatccttcatgccgccaacgtaatcacggacggtaaaatccgctacgctgtaatacaggctgttgatagtgaaatcgcggcgctgggcgtcttcttcgatggagccgaaaatgttgtcgcgcagcaacatgccgttttgcccgcgttgggaggtcgtgcggtcgctgacgttaccttcgtggtgtccacggaaggtcgcaacttcgataatctccgggccaaacattacatgagccagacggaaacggcgacccaccaggcggcagttacggaacagtttgcgcacctgctcaggcgtggcgttagtggttacgtcaaaatctttcggctttttgccaagtaacaggtcgcgcacgccgccgccaaccagccaggcttcgtatcccgctttattgagcctgtacattaccttcagggcattttcactgatatctttgcgggaaatagcatactgctcacgcgggatcaccgtcacctgtggacgggcgactgcctgttcagcctcgctttcctcgcggcttagcaccttgcggcaaaaattagcgactcgggtaaaaatagtacacctcggtagtgtcaaacatcattcaggacaaaaaaatagcggctaatcatagctcagcaactcgcattactgaatgtactatttacaattgcgctctcgggcacggcggtaagccgccagtttttgacggcactctgaaggatttgctcgacgctgaaatcctgccagtgtgcttctgcctgctgccccagaaattgaagtgccgcgattagtaccgggcgtggatcgcctttcggcaacgcaggcgcatgattctgcttggaaagtttagcgccttgtggattaagcgccagcggcagatgaatgtaatctggcactttccagccaaaaagctggtacaggctgatttgccttactgttggttcaatcagatcagccccacgcactatttctgtaacgccctggaaatgatcatcaaccacaacagccaggttgtaggcgaacaacccatcacggcgatgaatgataaaatcttcccgtgccagtttttcgtcggcgtgaataatgccgcgcagctggtcagtaaattgcgtgaccggatgctgctggcggatacgcactgcggcgttgtctggtccatgatgcaacacccggcaatgaccgtcgtaaataccgccaatgctttgaatacgcgcacgcgtacaggtgcagtaataacttagtccttgttcatgtaaccaggcgagtgcttcacgataggcgtcgtgacgttggctttgccagagaacatcgccgtcccagtgcagaccgtaatgttccagctggcgcaggatagtttctgcggcaccgggaacttcacgaggcgggtcgatatcttctatgcgtaccagccagcgaccttgccgggcgcgagcctgcaaatagctgccgagcgcggcgatcagagagccaaaatgaagctcgccggaaggagagggggcgaagcggccaatatactgtgtgtctgtcatctctttgaacaaaaaataaggcgggagcatttcccgcctgtggtaaacgtgatggaacggctgtaattagccagccatctgtttttcgcgaatttcagccagcgttttgcagtcgatgcacagatcggctgtcgggcgcgcttccagacggcgaataccaatttcaacaccgcaggattcgcagtagccgaaatcttcgtcttccacttttttcagcgtcttctcgatctttttgatcagcttacgctcgcgatcgcggttacgcagttcgaggctgaactcttcttcctgggctgcacggtctaccgggtccgggaagttggctgcttcatcctgcatatgtgtaacggtgcgatcgacttcatccctgagttgattacgccatgcttccagaatacgacggaagtgcgccagctgggcttcattcatatactcttcgcccggcttctcctgatatggttccaccccagcgatggcgagaatactcagggagcttgttttacggttttgcccttcttgcatgttgcttctccttaacacgcactatcgatccccatgttcgggggaaaaatgaggccgctataaatagcagatgcttttccggatagcaattatctaaacgtaacacttgacaactgtgtgaggaaaagcgtatttgcgcacgcgaccagaatgtaaattaaccagttacttactttattacaatgtaaccggcagactttttttaagagccatgccttcagcagaaatttccgctttgtaagccagaatttctacccccctctgttgagcttcactcaatagttgcgcgtatttctcatcgatgtggcgcgcgggactaaaccgtgtaatggcactatgcagcacggcgaaaaagataaccgcacgctggccttcagccgctacgctcatcaactcccgaaggtgtttctgacctcgttcagtgaccgcatcgggaaaatatccctgttcgttctccgctaacgtaacgcttttcacttcaatatagcagtctggacggctatccgcctgcaacataaagtcaatacggctgcgttctgcgccgtattttacttcgcttttcaggctgctatagccactcagttcactaatactttcattaaggatagcctctttcgtcaacctgttagcccaaagcgtgttgacgcaaataaatgcgccgctctggctttgagttaattcccaggtgtgtgggtatttccgtttggtgttgtcactagtgctataccagacggtatcgccaggcgttgcacaaccggtcatcgcacccgtattcgggcagtgtagcgttaattcgcgaccatcgggtgtgatcacatcggctaaaaaacgtttgtaacgctgaattagcgtcgcgcgctgtagagggggagaaaattccattgcgacaatccttgttattgcgttagcgcccagcgttttagcggcgtgtagcgtgtgcgtccacgggcaaagctggaggcgtaaagggtgaactccgtcaccgcatagctccagttaaaacctggcggcgggattgtcaccgcctcgctggcgtcgcgcaataaggtaatatgtggatgaaacggacgattgctttgaaaacaaccgctgcgggcagcctgactacggagcatattcgccagctggattaagccgcgtggcggctgacgcatccctaaccacaccacacggctacgcagccattgtccggcgtcatcaagcgtgagtgtgaaaccaggttgacgaatccgtccggctaaaagagaaagcgccttctctttctcggcgctcacttcgcctaaaaatgccagagtcagatgcaaattatcggcggcgaccggacgtcccgcctcaggtgggaagtgtgtggcgcgccaatggataatctgttcgcggatttctgcaggtaagtcgatagcaaagaacagacgttgcggttcagacatgtgaggcactcggttatgaattaccgcgatgctacaatgtggcgcgaagaatgttaaccctctggagcgttttgtgagcagcttgcccgttgctgccgtcttacctgaattacttaccgctctcgattgtgcgccgcaggtattattaagtgcgccgaccggggccgggaaaagtacctggctgccgctgcaactgctggcgcatcccggcattaacgggaaaattatcctgctggagccgcgtcgtctggcggcgcgtaacgtcgcgcaacggctggcggagctgcttaacgaaaagccaggcgataccgttggctaccggatgcgtgcgcaaaactgcgtcgggccgaatacccgcctggaagtggttaccgaaggcgtgctgacgcgcatgatccagcgtgacccggaactgagcggtgttggactggtgatccttgatgaatttcatgagcgcagcttgcaggcggatttggcgttggcgctgttactcgatgtgcaacaaggtctgcgtgatgaccttaaactgctgattatgagcgctaccctggacaacgaccgcttgcagcaaatgctgccagaagcgcctgtcgtcatcagtgaagggcgcagctttccggttgaacgccgttatttaccgctgcccgcgcatcagcgttttgacgatgccgttgcggtagccaccgctgaaatgctgcgtcaggaaagcggaagtttactgttatttttacctggcgtcggagaaattcagcgtgtgcaggaacaactggctagccgcatcggcagtgatgtattgctctgcccgctgtatggcgcgttgagcctgaacgatcagcgaaaagcgatcctcccggcaccgcaagggatgcgcaaagtggtgctggcgaccaatattgctgaaaccagtttaaccattgaaggtattcgtctggtggtggattgtgcccaggagcgtgtggcgcgttttgatccgcgcacggggcttacgcgactgattactcaacgcgttagccaggcatccatgacgcagcgtgccgggcgcgccgggcgtctggagccgggtatcagcctgcatttaatcgccaaagaacaagcagaacgcgccgcggcgcaaagtgaaccggagatcttacaaagcgatctttccggtttgctgatggaattactgcaatggggatgcagcgatccggcgcagatgagctggctggatcaaccgccagtagtgaatctactggccgcgaaacgtctgttacaaatgctgggggcactggagggtgaacggcttagtgcgcaagggcaaaaaatggcagcgctgggtaacgatccgcgtttagcggcaatgctggttagcgcgaagaacgacgacgaagctgctaccgcggcaaaaattgccgccattctcgaagagccgccacggatgggcaatagtgacctgggcgtggcgtttagccgcaatcaaccagcctggcagcaacgtagtcagcaactgttaaaacgcttaaacgtacgtggcggtgaggcagacagtagccttatcgcgccgctacttgccggggcgtttgccgatcgcattgctcgtcgccgtgggcaagatggacgctatcaactggcaaacggcatgggagcgatgctcgatgccaacgacgcgctaagccgccacgaatggttgatcgcaccgttattattgcagggcagcgccagcccggatgcgcggattttactggcgctgctggtcgatattgatgagttagtacaacgctgcccgcagctggtacagcagtctgacactgtggagtgggatgacgcgcaaggtacgctgaaagcctggcgtcggctacaaatcggtcagttgacggtgaaagtgcagccgctggcgaaaccgagtgaagacgagttgcatcaggcgatgcttaatggcatccgtgataaaggtttaagcgtgctcaactggacggcggaagcggaacagctacgcttgcgtttgttatgcgccgcaaagtggttgccggaatatgactggccagcggttgatgatgaaagtttattggcagcgctggaaacgtggctgctgccacatatgactggcgtacatagtctacgcggcctgaaaagtctcgacatttatcaggcactacgcggattacttgattggggaatgcagcaacgtctggatagtgaattgcctgcgcattacactgtgccgacgggaagccggatcgccattcgttatcatgaagataacccgcccgcgctggcggtgagaatgcaagagatgtttggcgaggccaccaatccgacgatcgcccaggggcgcgtgccgctggtgctggagttgcttagtcctgcccaaaggccattacaaatcacacgagatttgagcgacttctggaaaggagcgtaccgtgaggtgcaaaaagagatgaaagggcgttatcccaaacatgtctggccggacgacccggcaaatactgcaccgacgcgacggacgaaaaagtatagctaaggttggttttctccctctccctgtgggagagggccggggtgagggcatcagcgcgcacgttcaccctcaccctaaccctctccctcaagggagaggggaccgatcgagcacaaattttgagagatatcttcttctgtcttgtaacagaagaacagaaaatcgggcttttgcgcctgaatattgcggagaaaaagcatggccgggaatgaccgcgagccaattggacgcaaagggaaaccgacgcgtccggtcaaacaaaaggtaagccgtcgtcgttacgaagatgacgatgattacgacgattatgatgactatgaggatgaagaaccgatgccgcgcaaaggtaagggcaaaggcaaagggcgtaagcctcgtggcaaacgcggctggctatggctactgctaaaactggctatcgtttttgccgtgctgatcgccatttacggcgtttatctcgatcaaaaaattcgtagccgtattgatggcaaggtctggcaactgcctgcggcagtttatggccgaatggtcaatcttgagccagacatgaccatcagcaagaacgagatggtgaagctgctggaggcgacccagtatcgtcaggtgagcaaaatgacccgtcctggcgaatttaccgtgcaggccaacagcattgagatgattcgccgtccgtttgatttcccggacagtaaagaaggacaggtgcgcgcgcgtctgacctttgatggcgatcatctggcgacgatcgtcaatatggagaacaaccgtcagttcggtttcttccgtcttgatccgcgtctgatcaccatgatctctagcccaaacggtgagcagcgtctgtttgtgccgcgcagtggtttcccggatttgctggtggatactttgctggcgacagaagaccgtcatttttacgagcatgatggaatcagtctctacagtatcggacgtgcggtgctggcaaacctgaccgccggacgcacggtacagggtgcgagtacgctgacgcaacagctggtgaaaaacctgttcctctccagcgagcgttcttactggcgtaaagcgaacgaagcttacatggcgctgatcatggacgcgcgttacagcaaagaccgtattcttgagctgtatatgaacgaggtgtatctcggtcagagcggcgacaacgaaatccgcggcttcccgctggcaagcttgtattactttggtcgcccggtagaagagctaagcctcgaccagcaggcgctgttagtcggtatggtgaaaggggcgtccatctacaacccgtggcgtaacccaaaactggcgctggagcgacgtaatctggtgctgcgtctgctgcaacagcaacagattattgatcaagaactctatgacatgttgagtgcccgtccgctgggggttcagccgcgcggtggggtgatctctcctcagccagcctttatgcaactggtgcgtcaggagctgcaggcaaaactgggcgataaggtaaaagatctctccggcgtgaagatcttcactacctttgacagcgtggcccaggacgcggcagaaaaagccgccgtggaaggcattccggcactgaagaaacagcgtaagttgagcgatcttgaaactgcgattgtggtcgtcgaccgctttagtggtgaagttcgtgcgatggtcggaggttctgagccgcagtttgcgggctacaaccgtgcgatgcaggcgcgtcgtagcattggttcccttgcaaaaccagcgacttatctgacggccttaagccagccgaaaatctatcgtctgaatacgtggattgcggatgcgccaattgcgctgcgtcagccgaatggccaggtctggagtccgcagaatgatgaccgtcgttatagcgaaagcggcagagtgatgctggtggatgcgttgacccgtagcatgaacgtgccgacggtaaatctggggatggcgctggggctgcctgcggttacggagacctggattaaactgggcgtaccgaaagatcagttgcatccggttccggcaatgctgctgggggcgttgaacttaacgccaatcgaagtggcgcaggcattccagaccatcgccagcggtggtaaccgtgcaccgctttctgcgctgcgtagcgtaatcgcggaagatggcaaagtgctgtatcagagcttcccgcaggcggaacgcgctgttccggcgcaggcggcgtatctgacactatggaccatgcagcaggtggtacaacgcggtacgggtcgtcagcttggggcgaaatacccgaacctgcatctggcagggaaaacagggactaccaacaataacgtagatacctggtttgcgggcattgacggcagcacggtgaccatcacctgggtcggccgtgataacaaccagccgaccaaactgtatggtgccagcggggcaatgagcatttatcagcgttatctggctaaccagacgccaacgccgctgaatcttgttccgccagaagatattgcagatatgggcgtggactacgacggcaactttgtttgcagcggtggcatgcgtatcttgccggtctggaccagcgatccgcaaagcctgtgccagcagagcgagatgcagcagcagccgagtggcaatccgtttgatcagtcttctcagccgcagcaacagccgcaacagcaacctgctcagcaagagcagaaagacagcgacggtgtagccggttggatcaaggatatgtttggtagtaattaacatctaagcgtgaaataccggatggcgagttgccatccggtaaaataacatcccatctaagatattaaccctttcttttcatctggttgtttattaacccttcaggaacgctcagattgcgtaccgcttgcctgtaagactcaatgtaagccgtgccaaaatatgatggctaggacgagctagaacccgccagcgtttcgaatattatcttatctttataataatcattctcgtttacgttatcattcactttacatcagagatataccattccatataacggccctgtacgcctggacggataaagcgtttacgcgacaacggatgcccgatgcgacgctggcgcgtcttatcgggcctacaaacggccccgaatcgtaggtcggataaggcgttcacgccgcatccgacaaaccatgctggatcacaacttcgcaaacacccgacgtgcagcatcgatggtgttattgatatcttccatgctgtgcgccacggacataaagcccgcttcaaacgcactcggtgccaggtaaacaccttcgtccagcatcatatggaagaaacgcttaaagcgttccacgtcacaggccatcacatcctgatagcacgtcacggactcggcgtcggtaaagaaaataccgaacatgccgccaacgtggttaacgaccagcggaattccggcttcttctgccgcttccagcagaccttctgccagacgtgttgtcagctcatccagcgtttcgtgaacgcccggctgcgcgacttcattcagacaggcgaaacccgctgccatcgcaatcgggttaccggaaagcgtacccgcctgatagaccggacccgtcggggccagcgcatccattacatcacgacgaccaccgaatgcgcctaccggcattccaccgccgatgattttgccgaggcaggttaaatctggcactacgccgtaataatcctgtgcgccagctagcgctacgcggaaaccggtcatcacttcatcgatgatcagcaacgcgccaaattcgtcgcacagcgcgcgcagacctggcaggaactctggcagcggcggaacacagttcatattgcctgccaccggctcgacgataatacaggcaatctcttgcgggtattgctcaaatgcggcgcgtacagaagccagatcattataagtacaggttaaggtatatttggcgaaatctgccggaacgcccgggctgtttggctggcctaacgtgagtgcgccagaaccggctttcaccagcaggcagtcagcgtgaccatggtaacacccttcaaatttaataattttgtcgcgaccggtaaaaccacgggccaggcggatggcgctcatggtcgcttcagtgccggagttcaccatgcgcaccatatccatggtcgggaccagttcggtcaccagttgcgccattttcacttccatttcggttggtgcaccaaagcttaaaccacgctcggcggcttcaatcacggcattgcggattgccggatggttatggcccagcaccatcggcccccaggaaccgacataatcgatataggctttgccatcaacatcgtacagataagcgccgtccgctttttcgataaacagtggagtgccgcccacgccagtaaaggcgcgaacaggggagttcacaccgccagggatcagctcgcgcgctgcgctgtaaagattttcagacttactcatggagggttcctgattcgtagaaaaagtgaatggctgctattctatgttattcataacaagttaaatactcgtcaaacatcaggctgcttgtactggtgcaatcctgatttcttagagtataaaagttttgtgcatttgaaacattacgctttgcaaaggattttcatggaacgtgcgagtaaaatgccgtcatcttatttgtatgaccaataagtgatcattggatgaaaactgatactccctctttagaaacaccgcaggccgcgcgcctgcgacgcagacaactgattcgccaacttcttgagcgcgataaaaccccgttagccattttgtttatggcggcagtcgtcggcacgcttgttgggctggcagcggttgcttttgacaaaggtgtcgcctggttgcagaaccaacgtatgggggcgctggtacatactgctgataattatccgcttctgttaaccgtcgcttttctctgtagcgcggtgctggcgatgtttggctactttttggtgcgcaaatacgcgccggaagcaggtggtagcgggatcccggaaattgaaggggcgctggaagatcaacgtcccgttcgctggtggcgtgtattgccggtgaagttctttggcgggctggggacactcggcggaggcatggtgttggggcgcgaagggccaaccgtgcagatcggcggtaacattggccgtatggtgcttgatattttccgcctgaaaggtgacgaagctcgccatacgctgctggcaaccggtgctgctgcggggctggctgcggcctttaacgcgccgctggcgggtattttgtttattatcgaagagatgcgtccgcagtttcgctatacgttaattagcattaaagcggtatttattggtgtcattatgagcaccattatgtaccggatttttaatcatgaagttgcgttgattgacgtcggtaaactttctgatgcgccgcttaatacgctgtggctttatctgatcctcggtattatttttggcattttcggccctatttttaataaatgggtgctggggatgcaggatttgctgcaccgtgtgcacggcggcaatattaccaaatgggtgctaatgggcggtgcgattggcggtctgtgtggattgctggggtttgtggcaccagcaacgagcggcggcggttttaacctgattcctatcgctaccgcggggaatttcagcatgggaatgctggtgtttatcttcgtcgcgcgggtcattaccaccttactctgcttctcttccggcgcgccgggcggtatttttgccccgatgctggcgctgggtactgtgctgggaaccgctttcggaatggttgccgttgagctgtttccgcaatatcaccttgaggcggggacgtttgctattgccggaatgggggcattactggcggcatctattcgcgcgccgttaacggggatcattctggttctggagatgaccgataactaccagctcattttgccaatgattattaccggtcttggcgcaacactattagcgcaatttaccggcgggaaaccgctatacagcgcgattcttgcgcgcacgctggcaaaacaggaagctgagcaactggcgcgaagcaaggccgcaagtgccagcgagaatacttgaacgaaataccagggtattagataatggcgattattattgggttagaatttgcccaattgccgatgtcgtttggagcaaaatatgagtgatgacgtagcactgccgctggagtttaccgacgcagcagccaacaaagttaaaagcctgatcgctgacgaagataacccgaatctgaaattacgcgtgtatatcaccggtggcggttgcagcggcttccagtatggtttcacctttgatgatcaggtgaacgaaggcgatatgaccatcgaaaaacagggcgttggcctggtggttgatccgatgagcctgcaatatctggtcggcggttccgttgattataccgaaggtctggaaggttctcgtttcatcgtgaccaacccgaacgcgaaaagcacctgcggttgcggttcttcctttagtatctaatctgttgttcatgtgccggataaactatccggcacatcttctctcttcaacgcccattctcatccagcgcaaacgtcggtagcttaagatgccaacgaatagccgccagccgaatcaatagcgtcacgaccatgcccatcatactggctgtttccagtggtacggaaaatgtgtaataagccgtagcgtggacaataccgccgataatacaggcagttgcgtagatttctgtacgtaaaatcatggggatttcgcgggccagaacatcacgaatgatcccgccgccaacgccagtaatgacgcccatacaaaccgcgattaacggaccggcttccgcattaaaggctttattcacgccaatgccgacaaacaccgccagaccaacggcgtccagcaccggcaacatccattttggtaagcgtcttggctggcgcaccagcacgatggtcagcatgctggtgaccattgcaacgaccagatcggtgggatctttcacccaaaataccgggccgtgatccagcgccatgtcgcgaattgtcccgccgcctactgcggttaccacgcccagtaccagaacaccaaaagggtccatacgcaattttccggctaacaaaacgccggagatggcaaataccgctgtgccgactatatccagccaatagacgagcattgttcaatccccactgagcacctgaaaaggtcaggcgttaatctacctgactaagcgcattacagagctgttgtgcagcgaggataatacgtgggcttgcacgttcaaaccagtcactcgtgagaggaataacgggaattttgagctgttcaccccagtattgtttgattttaggaatttggtccggtccgcctgtaatgacaatcgcctgtgggctgcgtgctaacacctgttcgcggctaacttgcggccagggaacccggctgtctttaaagatgttttctccgccacaaacttcgagtacctggttctgaatgctctcttttccactggtaaatggcggattaatgccgaattgcagaaaaacacgttttttaggtttatcagcatattgcgctttcaattgcgcgtactgatccagcagggattgcgcggcttgttcggccttgtctggttgcggactccagggggccagttgacgtaacgcattggcaatttgttcaatgcttgtcgcatcgacccacatcacttttattcccaggctagccagctggtcaacctgccgctcggcattacctccacgccaggcaatcaccagatcgggtttcagcgcgacaatgcgttccagattcatcccctgccaggtggaaacctgctcaatcttttgcgcttgtggaggatagtcggaatagctgctgaccccaaccggcgtgatcccggcggcaaaggcaagttcagtgttggcgggagaaagcgtgatgacgcgcggcgcggcgttgagccacagtggcgcaagaaaagacagggcgaccagcgccctgaacagactcttagccatgtgcaagtttctgcaccagactctcaaccatcaggctggactgtttagcggcaacagccaggaactcatcgaagctaagatgagactgttgatcggccacgtcggagatggcgcgtacgacaacaaacgggacgttgaaattgtggcagacatgggcgattgccgtcgcttccatctctacagcaatggcctgtgggaagttgtggcggattttcgccagaccaacagaaccgttgatgaaagcgtcgccgctaacaatcaggccacgtacagcgttaagattcagttcggcaatgcaggcctcagcggcagcgatcagtttatcgtcagctttaaagcctgccggacagcctggtaactgaccgtattcataaccaaatgccgtgacatccgcgtcgtgataacgtgcttcgtcgctgacaacgatatcgcccactttcaacgttggtgccaggccaccggcagaaccggtgttaataatcacatctggcttgcagtgttccaacagcaaagtggcacccagcgccgcagcgactttaccgatgccgcttttcagaagcgcaacctcggttccattcagttggccggtatagatttcgcaaccgccgagactgatagtttgacggttttcgattttgtcacgcagcagcgtaacttcttcttccattgcaccaatgatgccgattttcatagatttactcgcgataagcccgatttgaaggcatagtttaccatgcgcttacggggaagcgtatttctcacgcgggagaggacatggcacagattgatttccgaaaaaaaataaactggcatcgtcgttaccgtagtccgcagggcgttaaaaccgaacatgagatcctgcggatcttcgagagcgatcgcgggcgtatcatcaactctccggcaattcgtcgtctgcaacaaaagacccaggtttttccactggagcgcaatgccgccgtgcgcacgcgtcttacccacagcatggaagtccagcaggtggggcgctacatcgccaaagaaattttaagccgtctgaaagagcttaaattactggaagcatacggcctggatgaactgaccggtccctttgaaagcattgttgagatgagttgcctgatgcacgatatcggcaatccgccgtttggtcattttggcgaagcggcgataaatgactggtttcgccaacgtttgcacccggaagatgccgaaagccagcctctgactgacgatcgctgcagcgtggcggcactacgtttacgggacggggaagaaccgcttaacgagctgcggcgcaagattcgtcaggacttatgtcattttgaggggaatgcacaaggcattcgcctggtgcatacattgatgcggatgaatctcacctgggcacaggttggcggtattttaaaatatacccgtccggcgtggtggcgtggcgaaacgcctgagacacatcactatttaatgaaaaagccgggttattatctttctgaagaagcctatattgcccggttgcgtaaagaacttaatttggcgctttacagtcgttttccattaacgtggattatggaagctgccgacgacatctcctattgtgtggcagaccttgaagatgcggtagagaaaagaatatttaccgttgagcagctttatcatcatttgcacgaagcgtggggccagcatgagaaaggtagcctctttagcctggtggttgaaaatgcctgggaaaaaagtcgcagtaatagtttaagccgcagtacggaagatcagttttttatgtatttacgggtaaacaccctaaataaactggtaccctacgcggcacaacgatttattgataatctgcctgcgattttcgccggaacgtttaatcatgcattattggaagatgccagcgaatgcagcgatcttcttaagctatataaaaatgtcgctgtaaaacatgtgtttagccatccagatgtcgagcggcttgaattgcagggctatcgggtcattagcggattattagagatttatcgtcctttattaagcctgagcttaagtgactttactgaactggtagaaaaagaacgggtgaaacgtttccctattgaaagccgcttattccacaaactcagcacgcgccatcggctggcctatgtcgaggctgtcagtaaattaccgagtgattctcctgagtttccgctatgggaatattattaccgttgccgcctgctgcaggattatatcagcggtatgaccgacctctatgcgtgggatgaataccgacgtctgatggccgtagaacaataaccaggcttttgtaaagacgaacaataaatttttaccttttgcagaaactttagttcggaacttcaggctataaaacgaatctgaagaacacagcaattttgcgttatctgttaatcgagactgaaatacatgaaaaaaaccacattagcactgagtgcactggctctgagtttaggtttggcgttatctccgctctctgcaacggcggctgagacttctagtgcaacgacagcccagcagatgccaagccttgcaccgatgctcgaaaaggtgatgcctagtgtggtcagcattaacgtagaaggtagcacaaccgttaatacgccgcgtatgccgcgtaatttccagcagttcttcggtgatgattctccgttctgccaggaaggttctccgttccagagctctccgttctgccagggtggccagggcggtaatggtggcggccagcaacagaaattcatggcgctgggttccggcgtcatcattgatgccgataaaggctatgtcgtcaccaacaaccacgttgttgataacgcgacggtcattaaagttcaactgagcgatggccgtaagttcgacgcgaagatggttggcaaagatccgcgctctgatatcgcgctgatccaaatccagaacccgaaaaacctgaccgcaattaagatggcggattctgatgcactgcgcgtgggtgattacaccgtagcgattggtaacccgtttggtctgggcgagacggtaacttccgggattgtctctgcgctggggcgtagcggcctgaatgccgaaaactacgaaaacttcatccagaccgatgcagcgatcaaccgtggtaactccggtggtgcgctggttaacctgaacggcgaactgatcggtatcaacaccgcgatcctcgcaccggacggcggcaacatcggtatcggttttgctatcccgagtaacatggtgaaaaacctgaccagccagatggtggaatacggccaggtgaaacgcggtgagctgggtattatggggactgagctgaactccgaactggcgaaagcgatgaaagttgacgcccagcgcggtgctttcgtaagccaggttctgcctaattcctccgctgcaaaagcgggcattaaagcgggtgatgtgatcaccagtctgaacggtaagccgatcagcagctttgccgcactgcgtgctcaggtgggtactatgccggtaggcagcaaactgaccctgggcttactgcgcgacggtaagcaggttaacgtgaacctggaactgcagcagagcagccagaatcaggttgattccagctccatcttcaacggcattgaaggcgctgagatgagcaacaaaggcaaagatcagggcgtggtagtgaacaacgtgaaaacgggcactccggctgcgcagatcggcctgaagaaaggtgatgtgattattggcgcgaaccagcaggcagtgaaaaacatcgctgaactgcgtaaagttctcgacagcaaaccgtctgtgctggcactcaacattcagcgcggcgacagcaccatctacctgttaatgcagtaatctccctcaaccccttcctgaaaacgggaaggggttctccttacaatctgtgaacttcaccacaactccatacatcttcatcatcctttaggcatttgcacaatgccgtacgttacgtacttccttatgctaagccgtgcataacggaggacttatggctggctggcatcttgataccaaaatggcgcaggatatcgtggcacgtaccatgcgcatcatcgataccaatatcaacgtaatggatgcccgtgggcgaattatcggcagcggcgatcgtgagcgtattggtgaattgcacgaaggtgcattgctggtacttagtcagggacgagtcgtcgatatcgatgacgcggtagcacgtcatctgcacggtgtgcggcaggggattaatctaccgttacggctggaaggtgaaattgtcggcgtaattggcctgacaggtgaaccagagaatctgcgtaaatatggcgaactggtctgcatgacggctgaaatgatgctggaacagagccggttgatgcacttgttggcgcaggatagccgtttgcgggaagaactggtgatgaacctgattcaggcagaggagaatactcccgcacttactgaatgggcgcaacggctggggatcgatctcaatcaaccgcgagtggtggctattgttgaggtcgacagcggtcagcttggcgtggacagcgcaatggcggagttacaacaactgcaaaacgcgctgactacgcccgagcgtaataatctggtggcgattgtcagcctaaccgaaatggtggtgttgaaaccggcgttgaactcttttgggcgctgggatgcagaagatcatcgtaagcgagttgaacaactgattacccgcatgaaagagtacggccagctgcgttttcgcgttagtctgggcaactattttaccggtcctggcagtattgcccgatcctatcgtacggcgaaaacgacgatggtggtgggtaaacagcggatgccagaaagtcgctgctatttttatcaggatctgatgttacctgtgttactcgacagtttgcgtggcgactggcaggccaacgaactggcgcgaccgctggcgcggctgaaaacgatggacaataacggcttgctgcgacgaacgctggcggcgtggtttcgccacaatgtgcaaccgctggcaacgagtaaggcgttgtttattcatcgtaataccctggagtatcggcttaatcgtataagcgaactgaccgggcttgatttgggcaattttgatgacaggttgctgctgtatgtggcgttacaactggatgaagagcggtaagttatgcgttaaggttgaggcggcgctggctcattcccctcagcccgaagggtagaggggaatgcccgaattaaccgtcagttcgggattatttacgcgttagtttttccagatcggcttcaatctcgctgatcttattggttacgacactctccaggtgacgtaagtcgtcgaggatcttacgcttaagatcaacttcgctgcggtcacgctggcagatttgatcaagctcatcaatgatataccgtagattcgggctgatttcctggacttctttataaccctgacccacaccatcagcgacgaccgttttacgctgacgcggatatttaaacttaacgctcttggcgaaaaactcgcctttgtctttctggaaatagattttcagaatatcgttgttggcttcctgccggaggctgtaacgatcaatttcttcaggattggtaatacccagacttttcagattgtcgtacatagcgttacctcaaaatgagtcagtaaattgtgcttattttagcatttggcctggcccgcccggctcgactgtgatcgcagaaagcctttttcttccagacttctatcatggcgtaaaaatcaaaaaattacctgctttattctggtgataaaattcacgatttacaccagttccagcatcgttacttccgggcggcagttcagacgcaaaccatacaaactgcccacgccacgggttgtgtagatgtgtctttcgccaaaggcatttaatccggcgacgtaacgtttatcttcgacaggggcaaaaggttcaccaaccaacggtacgcgcagttgcccgccgtgagtatggccgcacagcatcagatcccagggttcatcacgcatgacttctttgctgtcgggattatgcgccagcaccagtcttggcagattggcttcgctggcgggaggcggtttgcattgtccggcccataagtcaccagtgcctaccagttcgaattgcctgttcggcgtggcgatcaccgtagcctggttaaacaacaccgtgatgcccgcacttttcaacgtctcgccaattaagtgatttttttctgtaccaacagggcgatcgtggttgccgaagcaggcaaacgtcggcgcacattcggcaaggggggagagtacgtcactaaacgcgctaaaattcaggctcatatcaaataatacgtaatcgccgcccagtaatatcaaatcgggcttttgttctatgccaagagcaatcgcgtcagaaatcaggcttaaaggaacaaaacgagagtaatggagatcggccagaaaaagaattttgaatggtgctgcgttgtctttaaaaaaggcgaggcggtgacggattaattcaaaccagcctggctcacagtaatgcatataaccgaaaccactgctcgtggctatcgtcgcggcagtagcctgcaaaaatcggcggcgactaatcatcgctcatccctgcaaaaaaatcgggcagcgtcgtgctgcccgtgtgcatacttttagtcgatggtacgcagcagttcgttaatgccgactttgccgcgagttttcgcgtcaactttcttaacgataaccgcacagtagaggctgtatttgccatctttactcggcagattaccactaacaaccacagaccccgccggaacgcgaccgtagtggatttcgccggtttcacggtcgtaaatacgggtgctctgaccaatgtatacgcccatggaaatgacggaaccttcttcgacaatcaccccttcaaccacttcagagcgcgcgccgatgaagcaattatcttcaatgatggttgggttagcctgcagcggttccagcacgccgccgatgcccacgccaccggaaaggtggacgtttttaccaatctgcgcacaagaaccgacggtcgcccaggtatcaaccatggtgccttcatcaacatatgcgccgatgttgacgtaagacggcatcagcacggtgttacgggcaataaacgcaccctgacgtaccgccgctggtggcacaacgcggaagccttctttctggaaacgtgcttcgtcgtagtcggcgaatttcatcggcactttgtcgaagtagcggctttctgccccttcgatcacctgattatcattaatacggaaagagagcagcaccgcttttttcaaccactgatgcgtcacccactgaccgtcaattttttccgctacacgcagtgcgccggaatccagcagggcgatcacctgatttaccgcttcgcgggtaacggtgtctgcattggctggcgtgatctcggcacggcgttcaaaagcggtttcaataatgttctgtaactgctgcattgttaaactcttttcatatcagtaaacacatcaccctttatcgtttggattgagggcctctgtcaaccgctgatgcacttcctgctgcaactcgttattaagcgcacgccggtcagcggtggcaattatgaataaatcttctactcgctcgccaatggttgtaattcgggcaccatgaaggctaattcccagatcggcaaaaattttcccgactcgcgccagcagtccaggttggtcgagggcgatcagttcgaggaagcttttgcggtcggtatgggtcggcaaaaacgttacttcggtttcaacagtaaaatggcgtaatttggcgggttggcgacggggctgcggtggctgccagctactttgcgtcagtacttgctccagaccaaaccgaataacctcatgacgatctgcggacagcgggttgccatcgggttccagcacgataaaggtatccatcgccataccgtcgcgagtggtgaaaatttgtgcgtcgtgaacacttaaattgcggcggtctaattcggcacagacggcggcaaacagataagggcggtccgggctccagataaaaatctcggtgcctccacgcgtagcctgcgggctaagcaataccagcggtttgcttaaatcatgctgtaataaatggcgggcatgccaggccagttgatttgggctatggcggacaaaatagttagcacgacagcgactccaaatttggtgcagcgcctcttcgtcgatgttatccatgcgcagtagtgccagtgcctggagttggtgatggcgaacccgttcgcgcatatccggcgtgttttgcattccgcgtcgtagctgcttttcggtggcaaagtagagctcacgcaacagactttgcttccagctattccacagcgtttcgttggtggcgcaaatgtcagccacagtcaggcataccagatagcgcagacgattttccgtttgcacttcttcggcaaactgcttgatgacttccgggtcctgaatatcgcggcgttgggcggtcacgctcatcaacaggtgctggcgaaccagccaggcgaccagctgtgtttcgcgactgttcagcccgtggagttcggcaaaatgcactacatcctgagcaccgagaatggagtggtcgccgccgcgtcctttggcgatatcgtgaaacagcgcggcgatgaaaatcagctcagtactcggcaggcgcggccagacgtccacacacaacggatggcgctggcgcgtttcttcactggcaaaactctccagtttcagcatcacgcggatagtatgttcatccaccgtgtaggcgtggaacagatcaaactgcatctgcccgacgatatggctccattgcggcatatacgcgccgagcacgctatggcgatgcattggcaatagcccgcgccgcaccgctccggggtgacgcagaatgctcaaaaacagttttcgtgcttccggaatattacacagcggttgttgcagatggcgacgggcatggcgtaactggcgcagcgtggtggagtaaatgccggtgatcgcactgttgtgcaccatggtgtagaacatacgcaagatggcttccggctggcgcataaatagtgtttcatcacgcaggtcgattagcgtaccgcgtagctgaaactcatcgtcgattggacgtggtttttcgtcggcgggaagggcgaggatggcttcatcgaacagttgcagcagcatctggttgagttcactgacgcggcgtgtaacgcggaagtaatccttcatcatccgctcgaccggttcgttaccttcaccactgtaattcagacgctgggcgacgctaagctggcgatcgaataacaggcgattatcgtaacggctgacgaccagatgcagggcaaagcgaatacgccacaatatatgcagacattcgtttaattccgcccgctccgcactggttaagaagccaaacccgaccatttcatccaggcttgttgcgccaaaatgacggcgggccacccattgcagagtgtggatatcgcgcaagccgccagggctgcttttgatgtctggttcaaggttgtagctggtgccatggtaacgctgatggcgctggttctgttcttcaactttcgccgcgtagaacttgtcggaaggccagaatccttcgctgaaaatatgtttttgcagttcgaggaacagcgcaacatcgccaattaataagcgggattcgattaaattggtggcgacggttaaatcgcttaacccttccagcatgcactcttcaagcgtgcgcacgctatgaccgacttccagctttacatcccagagcagcgttaacagctcgcccactttttgcgcctgatcgtccgggagctttttacggcttaaaatcagtaaatcgacgtcactaagtggatgcagctcgccacgaccgtagccaccgacggcgaccaatgccaggtcggcaatctggctgaatcccgcttcaatccataatcgttgcaggagctggtcgataaactcggtgcgcgcctcaatcaactgttctgcagagatcccattgtcaaaggcatcacccagccaacgctggaaagtatcgatatgggcttttatcccaccgacggttaattcatcacggggccagacgcatggattttgcggttgaccgggcagggtggggagagcggtgtttgcgtactgttctggaagggtattcattgtgcgccacccataagattaaattatcgcattaaaaaagccggcattcgccggcttcatcttattcgtcgtggctgattatcgccgggatggtgtcatccttgcgtagcgtcagaatttcgcagccgttatcagtcaccacaatagtatgctcatattgtgcagacaagctgcgatctttggtttttaccgtccagccatctttcatggtgcggatctcttttttacccgcgttgaccattggctcgatggtgaacgtcatcccaggtttcagtacgacgttggtttcacgggagtcatagtgcagcacctgcggttcttcatggaagccgcgaccaataccgtgtccgcaatattcacgaacgacggagaagccttctgcttcgacaaatttctgaatcgccgcaccgatttcgcgcagattaatgcctggttttaccatgcgtagcgccaggtacaggctttcttgcgtgatgcggcacagacgttcgcccatgatggtcggcttaccgacgataaacattttgctggtatcgccgtggaaaccatctttgattacggtgacatcaatgttaacgatatcgccatctttcagcagcttagcatcgtccgggataccgtggcacaccacttcattaatagagatgcaaacggatttcggatagccgtgatagccgaggcaggcagaaaccgcgtgttgttcattaacaatgtaatcattacagatgcgatccagctcgccggtgctgacgcccggtttaacatacggttcgatcatctccagcacttcggcagccagtcggccagcgacgcgcattttttcgatatcttctggggtcttgatagagatagccattaattctgtccatcagcgtcggtgataccgacaatatatatgtaagtgccgtcaatggtatcacacccgggcaaattgagaatcattctgaatttcgccaaacgtgccactgaaggttttctataatagaaaattcgacgtctgatgctgtacacagcgccaacaattattggtgtccacgacgtatttgtggtataaagcgcgccggacttccgatccatttcgtatacacagactggacggaagcgacaatctcactttgtgtaacaacacacacgtatcggcacatattccggggtgccctttggggtcggtaatatgggatacgtggaggcataaccccaacttttatatagaggttttaatcatggcaactgtttccatgcgcgacatgctcaaggctggtgttcacttcggtcaccagacccgttactggaacccgaaaatgaagccgttcatcttcggtgcgcgtaacaaagttcacatcatcaaccttgagaaaactgtaccgatgttcaacgaagctctggctgaactgaacaagattgcttctcgcaaaggtaaaatccttttcgttggtactaaacgcgctgcaagcgaagcggtgaaagacgctgctctgagctgcgaccagttcttcgtgaaccatcgctggctgggcggtatgctgactaactggaaaaccgttcgtcagtccatcaaacgtctgaaagacctggaaactcagtctcaggacggtactttcgacaagctgaccaagaaagaagcgctgatgcgcactcgtgagctggagaaactggaaaacagcctgggcggtatcaaagacatgggcggtctgccggacgctctgtttgtaatcgatgctgaccacgaacacattgctatcaaagaagcaaacaacctgggtattccggtatttgctatcgttgataccaactctgatccggacggtgttgacttcgttatcccgggtaacgacgacgcaatccgtgctgtgaccctgtacctgggcgctgttgctgcaaccgtacgtgaaggccgttctcaggatctggcttcccaggcggaagaaagcttcgtagaagctgagtaataaggcttgataactcccccaaaatagttcgagttgcagaaaggcggcaagctcgagaattcccgggagcttacatcagtaagtgaccgggatgagcgagcgaagataacgcatctgcggcgcgaaatatgaagggggagagcccttatagaccaggtagtacacgtttggttagggggcctgcatatggccccctttttcacttttatatctgtgcggtttaatgccgggcagatcacatctccgaggattttagaatggctgaaattaccgcatccctggtaaaagagctgcgtgagcgtactggcgcaggcatgatggattgcaaaaaagcactgactgaagctaacggcgacatcgagctggcaatcgaaaacatgcgtaagtccggtgctattaaagcagcgaaaaaagcaggcaacgttgctgctgacggcgtgatcaaaaccaaaatcgacggcaactacggcatcattctggaagttaactgccagactgacttcgttgcaaaagacgctggtttccaggcgttcgcagacaaagttctggacgcagctgttgctggcaaaatcactgacgttgaagttctgaaagcacagttcgaagaagaacgtgttgcgctggtagcgaaaattggtgaaaacatcaacattcgccgcgttgctgcgctggaaggcgacgttctgggttcttatcagcacggtgcgcgtatcggcgttctggttgctgctaaaggcgctgacgaagagctggttaaacacatcgctatgcacgttgctgcaagcaagccagaattcatcaaaccggaagacgtatccgctgaagtggtagaaaaagaataccaggtacagctggatatcgcgatgcagtctggtaagccgaaagaaatcgcagagaaaatggttgaaggccgcatgaagaaattcaccggcgaagtttctctgaccggtcagccgttcgttatggaaccaagcaaaactgttggtcagctgctgaaagagcataacgctgaagtgactggcttcatccgcttcgaagtgggtgaaggcatcgagaaagttgagactgactttgcagcagaagttgctgcgatgtccaagcagtcttaattatcaaaaaggagccgcctgagggcggcttctttttgtgcccatcttgtaaattcagctaacccttgtggggctgcgctgaaaagcgacgtacaatgtcgctagtattaattcatttcaatcgttgacagtctcaggaaagaaacatggctaccaatgcaaaacccgtctataaacgcattctgcttaagttgagtggcgaagctctgcagggcactgaaggcttcggtattgatgcaagcatactggatcgtatggctcaggaaatcaaagaactggttgaactgggtattcaggttggtgtggtgattggtgggggtaacctgttccgtggcgctggtctggcgaaagcgggtatgaaccgcgttgtgggcgaccacatggggatgctggcgaccgtaatgaacggcctggcaatgcgtgatgcactgcaccgcgcctatgtgaacgctcgtctgatgtccgctattccattgaatggcgtgtgcgacagctacagctgggcagaagctatcagcctgttgcgcaacaaccgtgtggtgatcctctccgccggtacaggtaacccgttctttaccaccgacagtgcagcttgcctgcgtggtatcgaaattgaagccgatgtggtgctgaaagcaaccaaagttgacggcgtgtttaccgctgatccggcgaaagatccaaccgcaaccatgtacgagcaactgacttacagcgaagtgctggaaaaagagctgaaagtcatggacctggcggccttcacgctggctcgtgaccataaattaccgattcgtgttttcaatatgaacaaaccgggtgcgctgcgccgtgtggtaatgggtgaaaaagaagggactttaatcacggaataattcccgtgatggataaataagggtaagattccgcgtaagtatcgcgggggcgtaagtctggttataaggcgttattgttgcaggcagtttggtcacggccagcgcgcagcaaccggagcgtacaaaagtacgtgaggatggcgagcactgcccggggccaaaatggcaaataaaatagcctaataatccagacgattacccgtaatatgtttaatcagggctatacttagcacacttccactgtgtgtgactgtctggtctgactgagacaagttttcaaggattcgtaacgtgattagcgatatcagaaaagatgctgaagtacgcatggacaaatgcgtagaagcgttcaaaacccaaatcagcaaaatacgcacgggtcgtgcttctcccagcctgctggatggcattgtcgtggaatattacggcacgccgacgccgctgcgtcagctggcaagcgtaacggtagaagattcccgtacactgaaaatcaacgtgtttgatcgtagtatgtctccggccgttgaaaaagcgattatggcgtccgatcttggcctgaacccgaactctgcgggtagcgacatccgtgttccgctgccgccgctgacggaagaacgtcgtaaagatctgaccaaaatcgttcgtggtgaagcagaacaagcgcgtgttgcagtacgtaacgtgcgtcgtgacgcgaacgacaaagtgaaagcactgttgaaagataaagagatcagcgaagacgacgatcgccgttctcaggacgatgtacagaaactgactgatgctgcaatcaagaaaattgaagcggcgctggcagacaaagaagcagaactgatgcagttctgatttcttgaacgacaaaaacgccgctcagtagatccttgcggatcggctggcggcgttttgctttttattctgtctcaactctggatgtttcatgaagcaactcaccattctgggcagcaccggcagcattggttgcagcacgctggacgtggtgcgccataatcccgaacacttccgcgtagttgcgctggtggcaggcaaaaatgtcactcgcatggtagaacagtgcctggaattctctccccgctatgccgtaatggacgatgaagcgagtgcgaaacttcttaaaacgatgctacagcaacagggtagccgcaccgaagtcttaagtgggcaacaagccgcttgcgatatggcagcgcttgaggatgttgatcaggtgatggcagccattgttggcgctgctgggctgttacctacgcttgctgcgatccgcgcgggtaaaaccattttgctggccaataaagaaagtctggttacctgcggacgtctgtttatggacgccgtaaagcagagcaaagcgcaattgttaccggtcgatagcgaacataacgccatttttcagagtttaccgcaacctatccagcataatctgggatacgctgaccttgagcaaaatggcgtggtgtccattttacttaccgggtctggtggccctttccgtgagacgccattgcgcgatttggcaacaatgacgccggatcaagcctgccgtcatccgaactggagcatggggcgtaaaatttctgtcgatagcgctaccatgatgaacaaaggtctggaatacattgaagcgcgttggctgtttaacgccagcgccagccagatggaagtgctgattcacccgcagagtgtgattcacagtatggtgcgctatcaggacggcagtgttctggcgcagctgggggaaccggatatgcgtacgccaattgcccacaccatggcatggccgaatcgcgtgaactctggcgtgaagccgctcgatttttgcaaactaagtgcgttgacatttgccgcaccggattatgatcgttatccatgcctgaaactggcgatggaggcgttcgaacaaggccaggcagcgacgacagcattgaatgccgcaaacgaaatcaccgttgctgcttttcttgcgcaacaaatccgctttacggatatcgctgcgttgaatttatccgtactggaaaaaatggatatgcgcgaaccacaatgtgtggacgatgtgttatctgttgatgcgaacgcgcgtgaagtcgccagaaaagaggtgatgcgtctcgcaagctgaggataatccggctacagagagtcgcgctatttgttagcgtagggcttcagtgatatagtctgcgccatctgatcgtaagtagttggctttataaggtcagatatgccgtggttttacacggcttttttttgtataggcttcagtattcctgagtaccgtaaaccctgtcagggaataaaaaacgcgtgatgttgtctgctactcaaccacttagcgaaaaattgccagcgcatggctgccgtcatgttgcgatcattatggacggcaatggccgctgggcaaaaaagcaagggaagattcgtgcctttgggcataaagccggggcaaaatccgtccgccgggctgtctcttttgcggccaacaacggtattgaggcgttaacgctgtatgcctttagtagtgaaaactggaaccgaccagcgcaggaagtcagtgcgttaatggaactgtttgtgtgggcgctcgatagcgaagtaaaaagtctgcaccgacataacgtgcgtctgcgtattattggcgataccagtcgctttaacagccgtttgcaagaacgtattcgtaaatctgaagcgctaacagccgggaataccggtctgacgctgaatattgcggcgaactacggtggacgttgggatatagtccagggagtcaggcaactggctgaaaaggtgcagcaaggaaacctgcaaccagatcagatagatgaagagatgctaaaccagcatgtctgtatgcatgaactggcccctgtagatttagtaattaggactgggggggagcatcgcattagtaactttttgctttggcaaattgcctatgccgaactttactttacagatgttctctggcccgatttcgatgaacaagactttgaaggggcgttaaatgcctttgctaatcgagagcgtcgtttcggcggcaccgagcccggtgatgaaacagcctgatgggggtcgcttttgctgaagtatcgcctgatatctgcttttgtgttaatacccgtcgtcatcgcggcgttgtttctgttgccgccggtggggttcgccattgtaacgctggtggtctgcatgctggcagcgtgggaatggggacagcttagcggttttaccactcgtagccagcgagtatggttggcggtgttatgcgggttattgttggcgctgatgctttttctgttgccggaatatcaccgaaatattcatcaaccgctggttgaaatcagtctttgggctagcctgggttggtggattgtcgcgctattgctggtgctgttttacccaggttccgcagcaatctggcgtaactctaaaacattgcgccttatttttggcgtgctaaccattgttcccttcttctggggcatgctggcgttacgggcctggcactatgacgagaatcattacagtggcgcaatatggctgctctatgtcatgatcctggtatggggcgctgactccggcgcatatatgtttggcaaattgtttggtaaacataagctggcaccgaaggtttctccgggtaaaacctggcaaggctttatcggtggactcgctactgcagcggtaatcagttggggttatggcatgtgggcgaatctcgacgtcgctcccgtcaccttactcatttgctctattgtcgcagcgttagccagtgtgctcggcgatctgaccgagagtatgtttaagcgtgaagcaggaattaaggacagcggtcatttaattccaggacacggtggtattttagatcgtattgatagcctgacggctgcggtaccggtctttgcttgcttgttgttactggtattcaggacgctttaacggaaggtaatatgctgagttttctctgggatttggctagcttcatcgttgcactgggtgtacttatcaccgtgcatgaatttggtcatttctgggttgcccggcgttgtggtgttcgcgttgagcgtttcagtatagggtttggtaaggcgctctggcggcgaactgataagctcggcaccgaatatgttatcgccctgatcccgttgggcggttatgtcaaaatgctggatgagcgcgcagaaccggtcgttccggaactccgccaccatgccttcaataataaatctgtcggccaacgagcggcgattattgccgcaggtccggttgcaaacttcatttttgctatctttgcctactggctggtttttattattggtgtgcctggcgtacgtccggtggttggcgaaatagcagccaatagcatagctgcggaagcacaaattgcaccaggtacggaactaaaagccgtagatggtatcgaaacgcctgattgggatgccgtgcgtttgcagttggtcgataaaattggcgatgaaagcaccaccattacagtagcgccatttggcagcgaccaacggcgggatgtaaagctcgatttacgtcactgggcgtttgagcctgataaagaagatccggtatctagcctggggattcgtcctcgtgggccgcaaattgaacctgtactggaaaatgtgcagccaaacagcgcggcaagcaaggcaggtttgcaagcaggcgacaggatcgttaaagtcgatggtcagcccttaacgcagtgggtgacctttgtgatgcttgtccgggataacccgggtaaatccttagcgttagaaatcgaaaggcaggggagtcccttgtctttgacattaatcccggagagtaaaccgggtaatggtaaagcgattggttttgtcggtattgagccgaaagtcattcctttgccagatgagtataaagttgtacgccagtatgggccgttcaacgccatcgtcgaagccacggacaaaacgtggcagctgatgaagctgacggtcagtatgctgggaaaattgatcaccggtgatgtgaaactgaacaacctcagtgggccgatctctatcgccaagggggctgggatgacagcggaactcggggttgtttattacctgccgtttcttgcgcttattagcgtgaacttagggataattaacctgtttccgttgcccgtacttgacggggggcatctgctgttccttgcgatcgaaaagatcaagggcggaccggtatccgagcgggttcaagacttttgttatcgcattggcagcattctgctggtgctgttaatggggcttgcacttttcaatgatttctctcggttatgagagttagttaggaagaacgcataataacgatggcgatgaaaaagttgctcatagcgagcctgctgtttagcagcgccaccgtatacggtgctgaagggttcgtagtgaaagatattcatttcgaaggccttcagcgtgtcgccgttggtgcggccctcctcagtatgccggtgcgcacaggcgacacggttaatgatgaagatatcagtaataccattcgcgctctgtttgctaccggcaactttgaggatgttcgcgtccttcgtgatggtgatacccttctggttcaggtaaaagaacgtccgaccattgccagcattactttctccggtaacaaaagcgtgaaagatgacatgctgaagcaaaacctcgaggcttctggtgtgcgtgtgggcgaatccctcgatcgcaccaccattgccgatatcgagaaaggtctggaagacttctactacagcgtcggtaaatatagcgccagcgtaaaagctgtcgtgaccccgctgccgcgcaaccgtgttgacctaaaactggtgttccaggaaggtgtgagtgctgaaatccagcaaattaacattgttggtaaccatgctttcaccaccgacgaactgatctctcatttccaactgcgtgacgaagtgccgtggtggaacgtggtaggcgatcgtaaataccagaaacagaaactggcgggcgaccttgaaaccctgcgcagctactatctggatcgcggttatgcccgtttcaacatcgactctacccaggtcagtctgacgccagataaaaaaggtatttacgtcacggtgaacatcaccgaaggcgatcagtacaagctttctggcgttgaagtgagcggcaaccttgccgggcactccgctgaaattgagcagctgactaagatcgagccgggtgagctgtataacggcaccaaagtgaccaagatggaagatgacatcaaaaagcttctcggtcgctatggttatgcctatccgcgcgtacagagcatgcccgaaattaacgatgccgacaaaaccgttaaattacgtgtgaacgttgatgcgggtaaccgtttctacgtgcgtaagatccgttttgaaggtaacgataccagcaaagatgccgtcctgcgtcgcgaaatgcgtcagatggaaggtgcatggctggggagcgatctggtcgatcagggtaaggagcgtctgaatcgtctgggcttctttgaaactgtcgataccgatacccaacgtgttccgggtagcccggaccaggttgatgtcgtctacaaggtaaaagagcgcaacaccggtagcttcaactttggtattggttacggtactgaaagtggcgtgagcttccaggctggtgtgcagcaggataactggttaggtacaggttatgctgttggtatcaacgggaccaaaaacgattaccagacctatgctgaactgagcgtaaccaacccgtacttcaccgtagatggcgtaagcctcggtggtcgtctcttctataatgacttccaggcagatgacgccgacctgtccgactataccaacaagagttatggtacagacgtgacgttgggcttcccgattaacgaatataacagcctgcgtgcaggtctgggttatgtacataactccctgtccaacatgcagcctcaggttgcgatgtggcgttatctgtactctatgggtgaacatccgagcacctctgatcaggataacagcttcaaaacggacgacttcacgttcaactatggttggacctataacaagcttgaccgtggttacttcccgacagatggtagtcgtgtcaacctgaccggtaaagtgaccattcctggaagcgataacgaatactacaaagtgacgttagacacggcgacttatgtgccgatcgatgacgatcacaaatgggttgttctggggcgtacccgctggggttatggtgatggtttaggcggcaaagagatgccgttctacgagaacttctatgccggtggttccagcaccgtgcgtggcttccagtccaataccattggtccgaaagcagtttacttcccgcatcaggccagtaattatgatccggactatgattacgaatgtgcgactcaggacggcgcgaaagacctgtgtaaaagcgatgatgctgtaggcggtaacgccatggcggttgccagcctcgagttcatcaccccgacgccgtttattagcgataagtatgctaacagcgttcgtacttccttcttctgggatatgggtaccgtttgggatacaaactgggattccagccaatattctggatatccggactatagtgatccaagcaatatccgtatgtctgcgggtatcgcattacaatggatgtccccattggggccgttggtgttctcctacgcccagccgttcaaaaagtacgatggagacaaggcagaacagttccagtttaacatcggtaaaacctggtaagtgttctccacaaaggaatgtagtggtagtgtagcgatgactttaggcgatcaatataagatcgccgggccacgcaaagaactgcaccctccggtgcaaatgggatggtaaggagtttattgtgaaaaagtggttattagctgcaggtctcggtttagcactggcaacttctgctcaggcggctgacaaaattgcaatcgtcaacatgggcagcctgttccagcaggtagcgcagaaaaccggtgtttctaacacgctggaaaatgagttcaaaggccgtgccagcgaactgcagcgtatggaaaccgatctgcaggctaaaatgaaaaagctgcagtccatgaaagcgggcagcgatcgcactaagctggaaaaagacgtgatggctcagcgccagacttttgctcagaaagcgcaggcttttgagcaggatcgcgcacgtcgttccaacgaagaacgcggcaaactggttactcgtatccagactgctgtgaaatccgttgccaacagccaggatatcgatctggttgttgatgcaaacgccgttgcttacaacagcagcgatgtaaaagacatcactgccgacgtactgaaacaggttaaataagtaatgcctagtattcgactggctgatttagcgcagcagttggatgcagaactacacggtgatggcgatatcgtcatcaccggcgttgcgtccatgcaatctgcacaaacaggtcacattacgttcatggttaacccaaaataccgtgagcatttaggcttgtgccaggcgtccgcggttgtcatgacccaggacgatcttcctttcgcgaaaagtgccgcactggtagtgaagaatccctacctgacttacgcgcgcatggcgcaaattttagataccacgccgcagcccgcgcagaacattgcacccagtgcggtgatcgacgcgacggcgaagctgggtaacaacgtaagcattggcgctaacgcggtgattgagtccggcgttgaactgggcgataacgtgattatcggtgccggttgcttcgtaggtaaaaacagcaaaatcggtgcaggtagccgtctctgggcgaacgtaaccatttaccatgagatccagatcggtcagaattgcctgatccagtccggaacagtggtaggcgcagacggctttggttatgccaacgatcgtggtaactgggtgaagatcccacagattggtcgcgtaattattggcgatcgcgtggagatcggtgcctgcacaaccatcgatcgcggcgcgctggatgacactattattggcaatggcgtgatcattgataaccagtgccagattgcacataacgtcgtgattggcgacaatacggcggttgccggtggcgtcattatggcgggcagcctgaaaattggtcgttactgcatgatcggcggagccagcgtaatcaacgggcatatggaaatatgcgacaaagtgacggttacgggcatgggtatggtgatgcgtcccatcactgaaccaggcgtctattccagtggcattccgctgcaacccaacaaagtctggcgcaaaaccgctgcactggtgatgaacattgatgacatgagcaagcgtctgaaaagccttgagcgcaaggttaatcaacaagactaacgttccatcttttgttcgccaaactttacggcctgtctcattcttacgattgcggcaggccgtgttattattgtcgtttcttatattttgacaggaagagtatcttgactactaacactcatactctgcagattgaagagattttagaacttctgccgcaccgtttcccgttcttactggtggatcgcgtgctggattttgaagaaggtcgttttctgcgcgcagtaaaaaatgtctctgtcaatgagccattcttccagggccatttccctggaaaaccgattttcccgggtgtgctgattctggaagcaatggcacaggcaacaggtattctggcgtttaaaagcgtaggaaaactggaaccgggtgagctgtactacttcgctggtattgacgaagcgcgcttcaagcgcccggtcgtgcctggcgatcaaatgatcatggaagtcactttcgaaaaaacgcgccgcggcctgacccgttttaaaggggttgctctggtcgatggtaaagtagtttgcgaagcaacgatgatgtgtgctcgtagccgggaggcctgatacgtgattgataaatccgcctttgtgcatccaaccgccattgtggaagagggcgcgagtattggcgcgaacgcacacattggtcctttttgtatcgttggaccccatgtcgaaattggtgagggtaccgtactgaaatctcacgttgtcgtgaatggtcatactaaaattggccgcgataatgagatttatcagttcgcctccatcggcgaagttaaccaggatctgaaatatgctggcgaaccgacccgtgtggaaatcggcgatcgtaaccgcattcgcgaaagcgtcaccattcatcgtggcacagtccagggcggtggattgacgaaggtgggcagcgacaacttactgatgatcaacgcgcacattgcgcacgattgtacggtaggtaaccgctgtattctcgccaacaacgcaacgctggcgggtcacgtaagcgttgacgacttcgcgatcatcggcggcatgaccgcagtccatcagttctgcatcattggtgcgcacgtgatggttggcggctgctccggtgtggcgcaggacgtccctccttatgtcattgcgcagggtaaccacgcaacgccgttcggtgtcaatatcgaagggctgaagcgccgcggattcagccgtgaggcgattaccgctatccgcaatgcgtataagctgatttatcgtagcggtaaaacgctcgatgaagtgaaaccggaaattgctgaactggcggaaacatatccggaagtgaaagcctttaccgatttctttgcacgcagtacgcgcggtctgattcgttaatgactgaacagcgtccattaacgattgccctggtcgccggagaaacctccggcgatatcctgggggccggtttaatccgcgctctgaaagaacatgtgcccaacgcccgctttgttggtgttgccgggccacgaatgcaggctgaaggctgcgaagcctggtacgaaatggaagaactggcggtgatgggcattgttgaagtgctcggtcgtctgcgtcgcttactgcatattcgtgccgatctgacaaagcgttttggcgaactgaagccagatgtttttgttggtattgatgcgcctgacttcaatattactcttgaaggtaacctcaaaaagcagggtatcaaaaccattcattacgtcagtccgagtgtctgggcgtggcgacagaaacgtgttttcaaaataggcagagccaccgatctggtgctcgcatttctgcctttcgaaaaagcgttttatgacaaatacaacgtaccgtgccgctttatcggtcataccatggctgatgccatgccattagatccagataaaaatgccgcccgtgatgtgctggggatccctcacgatgcccactgcctggcgttgctaccggggagccgtggtgcagaagttgaaatgcttagtgccgatttcctgaaaacggcccagcttttgcgccagacatatccggatctcgaaatcgtggtgccactggtgaatgccaaacgccgcgagcagtttgaacgcatcaaagctgaagtcgcgccagaccttagtgttcatttgctggatgggatgggccgtgaggcgatggtcgccagcgatgcggcgctactggcgagcggtacggcagccctggagtgtatgctggcgaaatgcccgatggtggtgggatatcgcatgaagccttttaccttctggttggcgaagcggctggtgaaaactgattatgtcagcctgccaaatctgctggcgggcagagagttagtcaaagaattattgcaggaagagtgtgagccgcaaaaactggctgcggcgctgttaccgctgttggcgaacgggaaaaccagccacgcgatgcacgataccttccgtgaactgcatcagcagatccgctgcaatgccgatgagcaggcggcacaagccgttctggagttagcacaatgatcgaatttgtttatccgcacacgcagctggttgcgggtgtggatgaagtcggacgcgggccgttagttggcgcggtcgtcaccgctgcggtgatccttgacccggcgcgcccgattgccgggctgaatgattccaaaaagctgagcgaaaaacgccgtctggcgctctatgaagagatcaaagagaaagcgttgagctggagtctgggccgcgcggaaccccacgaaatcgacgagctgaacattcttcatgcgaccatgctggcgatgcagcgtgccgtcgctgggctgcatattgcgccggaatatgtgttgattgatggtaaccgctgcccgaaattaccgatgcctgcgatggctgtggtgaaaggcgatagccgcgtaccggaaatcagtgccgcgtctatcctggcgaaagtgacgcgtgacgccgaaatggcggcgctggatattgttttcccgcaatatggttttgcccaacacaaagggtacccaaccgcttttcatctggaaaaactggctgaacacggcgcgaccgaacaccatcggcgcagctttgggcctgtcaaacgcgcactgggacttgcgtcctgattcttgtgtcgagattaagtaaaccggaatctgaagatgtctgaaccacgtttcgtacacctgcgggtgcacagcgactacagcatgatcgatggcctggccaaaaccgcaccgttggtaaaaaaggcggcggcgttgggtatgccagcactggcgatcaccgatttcaccaacctttgtggtctggtgaagttctacggagcgggacatggcgcagggattaagcctatcgtcggggcagattttaacgtccagtgcgacctgctgggtgatgagttaacccacctgacggtactggcggcgaacaataccggctatcagaatctgacgttgctgatcagtaaagcgtatcagcgcgggtacggtgccgccgggccgatcatcgatcgcgactggcttatcgaattaaacgaagggttgatccttctttccggcggacgcatgggcgacgtcggacgcagtcttttgcgtggtaacagcgcgctggtagatgagtgtgtcgcgttttatgaagaacacttcccggatcgctattttctcgagctgatccgcaccggcaggccggatgaagaaagctatctgcacgcggcggtggaactggcggaagcgcgcggtttgcccgtcgtggcgaccaacgacgtgcgctttatcgacagcagcgactttgacgcacacgaaatccgcgtcgcgatccacgacggctttaccctcgacgatcctaaacgcccgcgtaactatagcccgcagcaatatatgcgtagcgaagaggagatgtgtgagctgtttgccgacatccccgaagcccttgccaacaccgttgagatcgccaaacgctgtaacgtaaccgtgcgtcttggtgaatacttcctgccgcagttcccgaccggggacatgagcaccgaagattatctggtcaagcgtgcaaaagagggcctggaagagcgtctggcctttttattccctgatgaggaagaacgtcttaagcgccgcccggaatatgacgaacgtctggagactgaacttcaggttatcaaccagatgggcttcccgggctacttcctcatcgttatggaatttatccagtggagcaaagataacggcgtaccggtagggccaggccgtggctccggtgcgggtagtctggtggcctacgcgctgaaaatcaccgacctcgatccgctggaatttgacctgctgttcgaacgtttccttaacccggaacgtgtctccatgcctgacttcgacgttgacttctgtatggagaaacgcgatcaggttatcgagcacgtagcggacatgtacggtcgtgatgcggtaagccagatcatcaccttcggtacaatggcggcgaaagcggtgatccgcgacgtaggccgcgtgctggggcatccgtacggctttgtcgatcgtatcagcaaactgatcccgcccgatccggggatgacgctggcgaaagcgtttgaagccgagccgcagctgccggaaatctacgaagcggatgaagaagttaaggcgctgatcgacatggcgcgcaaactggaaggggtcacccgtaacgccggtaagcacgccggtggggtggttatcgcgccgaccaaaattaccgattttgcgccgctttactgcgatgaagagggcaaacatccggtcacccagtttgataaaagcgacgttgaatacgccggactggtgaagttcgacttccttggtttgcgtacgctcaccatcatcaactgggcgctggagatgatcaacaagcggcgggcgaagaatggcgagccgccgctggatatcgctgcgatcccgctggatgataagaaaagcttcgacatgctgcaacgcagcgaaaccacggcggtattccagcttgaaagccgcggcatgaaggacctgatcaagcgtctacaacctgactgcttcgaagatatgatcgccctagtggcactgttccgccccggtccgttgcaaagtgggatggtggataactttatcgaccgtaaacatggtcgtgaagagatctcctatccggacgtacagtggcagcatgaaagcctgaaaccggtactggagccaacctacggcattatcctgtatcaggaacaggtcatgcagattgcgcaggtgctttctggttataccctcggtggcgcggatatgctgcgtcgtgcgatgggtaagaaaaagccggaagagatggctaagcaacgttctgtatttgctgaaggtgcagaaaagaacggaatcaacgctgaactggcgatgaaaatcttcgacctggtggagaaattcgctggttacggatttaacaaaagccactctgcggcctatgctttggtgagttatcaaacgttatggctgaaagcgcactatcctgcggagtttatggcggcggtaatgaccgccgatatggacaacaccgagaaggtggtgggtctggtggatgagtgctggcggatggggctgaaaatcctgccaccagatataaactccggtctttaccatttccacgtcaacgacgacggcgaaatcgtgtatggtattggcgcgatcaaaggggtcggtgaaggtccgattgaggccatcatcgaagcccgtaataaaggcggctacttccgcgaactgtttgatctctgcgcccgtaccgacaccaaaaagttgaaccgtcgcgtgctggaaaaactgatcatgtccggggcgtttgaccgtcttgggccacatcgcgcagcgctgatgaacagcctgggcgatgcgttaaaagcggcagatcaacacgcgaaagcggaagctatcggtcaggccgatatgttcggcgtgctggccgaagagccggaacaaattgaacaatcctacgccagctgccaaccgtggccggagcaggtggtattagatggggaacgtgaaacgttaggcctgtacctgaccggacaccctatcaaccagtatttaaaagagattgagcgttatgtcggaggcgtaaggctgaaagacatgcacccgacagaacgtggtaaagtcatcacggctgcggggctcgttgttgccgcgcgggttatggtcaccaagcgcggcaatcgtatcggtatctgcacgctggatgaccgttccgggcggctggaagtgatgttgtttactgacgccctggataaataccagcaattgctggaaaaagaccgcatacttatcgtcagcggacaggtcagctttgatgacttcagcggtgggcttaaaatgaccgctcgcgaagtgatggatattgacgaagcccgggaaaaatatgctcgcgggcttgctatcagcctgacggacaggcaaattgatgaccagcttttaaaccgactccgtcagtctctggaaccccaccgctctgggacaattccagtacatctctactatcagagggcggatgcacgcgcgcggttgcgttttggcgcgacgtggcgtgtctctccgagcgatcgtttattaaacgatctccgtggcctcattggtagcgagcaggtggaactggagtttgactaatacaggaatactatgagtctgaatttccttgattttgaacagccgattgcagagctggaagcgaaaatcgattctctgactgcggttagccgtcaggatgagaaactggatattaacatcgatgaagaagtgcatcgtctgcgtgaaaaaagcgtagaactgacacgtaaaatcttcgccgatctcggtgcatggcagattgcgcaactggcacgccatccacagcgtccttataccctggattacgttcgcctggcatttgatgaatttgacgaactggctggcgaccgcgcgtatgcagacgataaagctatcgtcggtggtatcgcccgtctcgatggtcgtccggtgatgatcattggtcatcaaaaaggtcgtgaaaccaaagaaaaaattcgccgtaactttggtatgccagcgccagaaggttaccgcaaagcactgcgtctgatgcaaatggctgaacgctttaagatgcctatcatcacctttatcgacaccccgggggcttatcctggcgtgggcgcagaagagcgtggtcagtctgaagccattgcacgcaacctgcgtgaaatgtctcgcctcggcgtaccggtagtttgtacggttatcggtgaaggtggttctggcggtgcgctggcgattggcgtgggcgataaagtgaatatgctgcaatacagcacctattccgttatcagcccggaaggttgtgcgtccattctgtggaagagcgccgacaaagcgccgctggcggctgaagcgatgggtatcattgctccgcgtctgaaagaactgaaactgatcgactccatcatcccggaaccactgggtggtgctcaccgtaacccggaagcgatggcggcaagcttgaaagcgcaactgctggcggatctggccgatctcgacgtgttaagcactgaagatttaaaaaatcgtcgttatcagcgcctgatgagctacggttacgcgtaattcgcaaaagttctgaaaaagggtcacttcggtggcccttttttatcgccacggtttgagcaggctatgattaaggaaggattttccaggaggaacacatgaacatcattgccattatgggaccgcatggcgtcttttataaagatgagcccatcaaagaactggagagcgcgctggtggcgcaaggctttcagattatctggccacaaaacagcgttgatttgctgaaatttatcgagcataaccctcgaatttgcggcgtgatttttgactgggatgagtacagtctcgatttatgtagcgatatcaatcagcttaatgaatatctcccgctttatgccttcatcaacacccacagcacgatggatgtcagcgtgcaggatatgcggatggcgctctggttttttgaatatgcgctggggcaggcggaagatatcgccattcgtatgcgtcagtacaccgacgaatatcttgataacattacaccgccgttcacgaaagccttgtttacctacgtcaaagagcggaagtacaccttttgtacgccggggcatatgggcggcaccgcatatcaaaaaagcccggttggctgtctgttttatgattttttcggcgggaatactcttaaggctgatgtctctattagcgtcaccgagcttggtagcttgctcgaccacaccgggccacacctggaagcggaagagtacatcgcgcggacttttggcgcggaacagagttatatcgttaccaacggaacaagcacgagcaacaaaattgtgggtatgtacgccgcgccatccggcagtacgctgttgatcgaccgcaattgtcataaaagcctggcgcatctgttgatgatgaacgatgtagtgccagtctggctgaaaccgacgcgtaatgcgttggggattcttggtgggatcccgcgccgtgaatttactcgcgacagcatcgaagagaaagtcgctgctaccacgcaagcacaatggccggttcatgcggtgatcaccaactccacctatgatggcttgctctacaacaccgactggatcaaacagacgctggatgtcccgagcattcacttcgattctgcctgggtgccgtacacccattttcatccgatctaccagggtaaaagtggtatgagcggcgagcgtgttgcgggaaaagtgatcttcgaaacgcaaagcacccacaaaatgctggcggcgttaagccaggctagcctgatccacattaaaggcgagtatgacgaagaggcctttaacgaagcctttatgatgcataccaccaccagccccagttatcccattgttgctagcgttgagacggcggcggcgatgctgcgtggtaatccgggcaaacggctgattaaccgtagtgtagaacgagctctgcattttcgcaaagaggtccagcggctgcgggaagagtctgacggttggtttttcgatatctggcaaccgccgcaggtggatgaagccgaatgctggcccgttgcgcctggcgaacagtggcacggctttaacgatgcggatgccgatcatatgtttctcgatccggttaaagtcactattttgacaccggggatggacgagcagggcaatatgagcgaggaggggatcccggcggcgctggtagcaaaattcctcgacgaacgtgggatcgtagtagagaaaaccggcccttataacctgctgtttctctttagtattggcatcgataaaaccaaagcaatgggattattgcgtgggttgacggaattcaaacgctcttacgatctcaacctgcggatcaaaaatatgctacccgatctctatgcagaagatcccgatttctaccgcaatatgcgtattcaggatctggcacaagggatccataagctgattcgtaaacacgatcttcccggtttgatgttgcgggcattcgatactttgccggagatgatcatgacgccacatcaggcatggcaacgacaaattaaaggcgaagtagaaaccattgcgctggaacaactggtcggtagagtaagcgcaaatatgatcctgccttatccaccgggcgtaccgctgttgatgcctggagaaatgctgaccaaagagagccgcacagtactcgattttctactgatgctttgttccgtcgggcaacattaccccggttttgaaacggatattcacggcgcgaaacaggacgaagacggcgtttaccgcgtacgagtcctaaaaatggcgggataacttgccagagcggcttccgggcgagtaacgtgctgttaacaaataaaggagacgttatgctgggtttaaaacaggttcaccatattgcgattattgcgacggattatgcggtgagcaaagctttctactgcgatattcttggtttcacgctgcaaagcgaagtctatcgcgaagcgcgcgacagttggaaaggggatttggcgcttaatgggcaatatgtgattgagcttttcagttttccgttcccgccggaacgacccagccgaccggaagcttgcggtctgcgtcatctggcttttagcgttgatgacatcgatgcggcagtggcgcaccttgaaagccataacgtgaagtgtgaaaccatccgtgtcgatccatacacgcaaaaacgcttcaccttctttaacgatccggacgggctgccgttggaactgtatgagcagtaaggcttgtcatcgccgcatttgcccggtaacgtgccgggcattgctactgtaaaatcgcaccatcatgacactcacgctcaatagacaacttctcaccagtcgccagattctggtggcctttagcggcgggcttgactccaccgttctgctgcatcagttggtgcagtggcggacggaaaatccgggtgtcgctctgcgcgctattcatgtgcatcacggtttaagtgccaatgccgatgcctgggttacgcattgcgaaaacgtctgccaacagtggcaggtgccgctggtggtcgaacgcgtacaacttgcgcaagaaggactgggcattgaggcccaggcgcggcaggcacgttatcaggcatttgcccgcaccttgttgcccggtgaagtgctggtcaccgcgcaacatctcgacgatcaatgtgaaacctttctgctggcgctaaaacgcggcagtggccctgccgggcttagcgctatggcggaagtcagcgagtttgccggaacgcggcttattcgcccgttgctcgcccgcacgcggggggaactggtgcagtgggcgcgtcagtatgatttacgctggattgaagacgaaagtaatcaggacgacagttacgatcgtaactttctgcgcctgcgcgtagtgccgttattgcagcagcgttggccgcattttgccgaagcaacggcccgcagcgccgcactttgtgctgaacaagagagcctgctggatgaactgctggcagatgatttagcacactgtcaaagcccgcaggggacgctgcagattgtgccaatgctggcgatgagtgatgcccgccgcgcggcgattatccgccgctggctggcagggcagaatgcaccgatgccttcccgcgacgcgttggtgaggatctggcaggaagtggcgctggcgcgggaagatgccagtccctgtttacgtttgggcgcgtttgaaatccgacgctatcagagccaactgtggtggattaaatccgtcaccgggcaaagcgaaaacattgtgccgtggcagacgtggcttcaaccgctggaattaccggcggggctgggaagtgtacagcttaatgcgggaggcgatattcgccctccgcgtgcagacgaagcggtcagcgtgcgtttcaaagcgccaggattgctgcatattgtcgggcgtaacggcggacgtaagctaaagaaaatctggcaagagctgggcgtgccgccgtggctacgtgacaccacgccactgctgttttatggcgaaacgctgattgcggcggcaggggtatttgtgacgcaagaaggtgtggctgaaggtgagaatggcgtaagttttgtctggcagaaaacgcttagttaagtgaaagccggataagacgcatcaaacgtcgcatccggcgaaagtcaatcaggattcgcttaccaccaccgtaccgatttccgggtggctaaagctggtaattttatccagacgcagctcgcgggtttcgccagcggcctcgacgaccaggtactccacatttttgcgggagactaaatcactggcttttgcctgcaatttttcgccatctttcagctcaagtgtcagcattaaatgatgctggcaggcgagctcaagattatcgtaatcatcacaattgattggttgatacgtatcattcattgacataatcgctcaccagtaagtttgccgcagcgtatgctgctttttccctgacagcctcagaaagggcgtcgtcggcagccatttcattcagcactttcaaaacgcagcccagcgcgtccggaacgtatcctaagtctccgctggcgatttccgcgtaccgcttgcgtattaactcacaatatttttccacatgccctcctgtcagcactctgacttaaccgtggatgcaagtctaagcctacgaagataaactctgtttcgcaaggtgactataccacactcatttctgcaatatcagcgccgcaactgcacgtattccgttacaatggcctcctgattcgaaaggagttttcttatggcgcttaaagcgacaatttataaagcgacggttaatgtggccgatctcgaccgcaaccagtttctcgatgcctctctgacgctggcgcgccatcctagtgaaacccaggagcgtatgatgctgcgcttgctggcgtggctgaaatatgctgatgaacgtctgcaatttacccgtggtttgtgtgccgatgatgagccggaagcgtggctgcgtaacgatcacctgggcattgatttgtggattgagctggggctgccggatgagcggcggattaagaaagcctgcacccaggccgcagaagtggcgctgtttacctataatagtcgggcggcgcaaatctggtggcagcaaaatcagagcaaatgtgtgcagtttgccaatctttccgtctggtatctggacgatgaacaactggcgaaagtaagcgcctttgccgatcgtaccatgacgctgcaggcaacgattcaggatggcgtgatctggttaagcgatgataagaataatctggaagtgaacttaaccgcctggcaacaacctagttgaactaaaccgcctggcaacaaccttcatgattgtgatttcccgacatgttgctattcccgatggtgagcttgagatcaccgccattcgtgcgcagggcgcgggcgggcagcatgttaataagaccagtacggctattcatctgcgttttgacattcgggcgtccagcctgccagagtattacaaagagcgtctgctcgccgccagccatcatttgatcagcagtgatggcgtgattgtcattaaggcacaggaataccgcagtcaggaactgaaccgcgaagcagctctggcccggctggtggctatgattaaagaattaacaacagaaaaaaaagcccgacgacccacgcggcccacccgtgcaagcaaagagcgcaggctggcaagcaaagcacaaaaaagtagcgtgaaggcgatgcgcggcaaagtgcgcagcggtcgggaataaaaagaaggaatggatggtgaaaaaagcgatagtgacagcgatggctgtaatcagcctctttactctgatgggatgtaataatcgggccgaagtcgatacgctttctccggcgcaggctgccgaactgaaaccgatgccgcaaagttggcgcggcgtgctgccgtgtgccgattgcgaaggaatcgaaacctctctgttcctcgaaaaagacggaacatgggtgatgaatgagcgttatctcggtgctcgtgaagaaccttcctccttcgcttcctacggtacatgggcgcgaaccgctgacaagctggtattaaccgacagcaaaggtgaaaagagttattatcgggcgaaaggcgatgcgctggagatgctcgatcgtgaaggcaatccgattgaaagccagttcaactatacgctggaagcggcacaatccagtttacctatgacgccgatgaccctgcggggcatgtatttttatatggctgatgcggcgaccttcactgattgcgcgaccggaaaacgtttcatggtagcgaataacgcagagctggagcgtagctacctggctgcgcgcggtcacagtgaaaaaccggtgttactgagtgtagaaggtcactttacgcttgagggtaatccggataccggtgcgccgactaaagtattggcacccgatacggcagggaaattttaccccaaccaggattgcagtagtttggggcagtaacccgtcttgagacagaaacaaacgcaaaacaggccagaaggatatatttcaacattttgaatttgcacgttttttgtaggccggataaggcgtttacgccgcatccggcaatggtgctcaacgcctgatgcgacgctggcgcgtcttatcatgcctacaacccccctcataccttaaggcggataaggcatttactttatcaccgggtcaaaccaacaaagcgacccgccttgatataaatcccaggcttcaggtgcccaacatactgtaactgcgtttctggcttaaacgcagagacatcaccaatacgcatatgcatcagatcggcagggctaatccagccgctttgcgccagtgtaagtggatgcccggctttggcaaaggcatccgtgacaaattcgctacaaaaccagctctttttgtctccttcgcccacactgcttaactgcgctttcgccaggccgctgacgcactgttggcgaaaatcctcggagaacggattcagactgcacatctggcgagtcaccataaagggaataaattcgacaatgccgcgatagttataaccgctatctttgattttattggcaaacgcggtgatatctgtggcttgttgcggggtaagatccgggactcgtaagacgaaaagcttatcactatgcttcatcgcttttttaagggaaacgatctggacgccagcgcctgtcgcttctgcaacgttattatcacccagaaagattgcaacgtgactcacagaggaagtgctgaagacgcggattccaaaactggttaccccaaggctactggagaacagcaaatcgccgggtttgagatcaggtgccgttatttcttttatactttgttcggtgaaagagctttgatgctggaatttgacagcccatgtttttgcctcggcatctactgctgtggcacttgggtctggctggctgatatcaacggtacaagcgctaagtaaaagaaagctggggagaaacaggcggcagtacgcctttggtttatccattttatacaatccatgtaaaaaaagggccctgaaattcaggaccctttctggcatcagcctttaatctgtttcaccagatattcgacgatgtcaccagtcttaattaactgtttctcgccgttgcgacgatatttatattcgatatcgtcgttgtcgaggttacggtcgcccagcacaatagtgtgcggaataccgatcagttccatatcagcaaacatcacgcccggacgctctttgcggtcatccagcagcacttcgataccttgtgcacgcagttcgctgtacagtttctcagcaagctcttgtacgcggaaggatttgtgcatgttcatcggcagaatcgccacctggaacggcgcgatagcgtcaggccatacgatgcctcgttcgtcgtagttctgctcaatcgccgcagctaccacacgcgttaccccgataccgtagcaacccatcgtcaggatttggttacggccatcttcaccctgtacggaggctttcagtgcttcggagtacttggtacccagctggaagatgtgaccaacttcgataccacgtttgatcagcagcctaccctggccatccgggcttggatcgccagccaccacgttacggatatctgcaacttccggggtagcgacatcgcgatcccagttgatgccgaagtagtgtttaccatcgatgttagcaccagcagcgaaatcactcatcgccgcaacggtacggtcaatcaccaccggaatcggcatgtttaccggacccagactacccggaccggctttaaccacggcacgaatttcttcttcggtcgcgaaagtcagcgggcttgcaacctgcggcagtttttctgctttaacttcgttcagctcgtgatcaccgcgcaccagcagcgcaacctgcgggaagctgctgccttcaaccgctttaaccagcagagtcttaaccgttttctcaatcggcagattgaactgttcaaccagttccgcgatggttttcgcgttcggcgtatcaaccagcgtcatttcctgggtagcagcagcgcgcggttctttcggcgcgatagcttctgccagttcaatgttcgctgcatagtcagaggtgtcggagaagaccacatcgtcttcaccgctctgcgccagcacctggaattcgtgagaggcgctgccgccgatagaaccggtgtcggcttgtacggcgcggaaatccagccccatgcggctgaagattttgctgtaggccgcatacattgcatcgtaggtttcctgcagggattcctgagaagtatggaaagagtaagcatctttcatcaggaattcgcgggaacgcatgacgccgaaacgcggacgcacttcgtcgcggaacttggtctggatctgatagaagttcagcggcagctgtttgtaagagctaagctcgttacgaatcaggtcagtgataacttcttcatgagttgggccgagtacgaacggacgctcgccacggtcaacaaaacgcagcagttccggaccgtactgttcccaacgaccactctcttgccacaaatcggctggctgaaccaccggcatgctcacctcgatcgcaccggcgttgttcatctcttcacgcacgatgttttcgacttttttcagaacgcgcacgccggtcggcagccaggtatataacccggaggccagcttgcggatcatcccggcgcgcagcatcagctgatggctgatcacctcggcgtcggcaggtgtctccttgagagtggagagcaggtattggctagtacgcatgttgttacggttccagttggaaggtagaacaggctcaaggcgagcctgggacaaaaaaaagtgatttagtttaccagtgcaaaagaaatgtcaaaagagaagggcgtgaatttaacgcggttccagcgcaaagacttcaaaacctgcgtcggtgacgcgccagcgaacgttaaaatcatgtagccagacggcataggttttgcccgtttcctcacctttacgataggccgggcgcgggtcctgcgccagtacttcgcggataaacagcgttaactgcggataacgcttctccagcgtcaaaagctgcttttcgacctctgcggtaaaactcaccgccatctctgcagctggcgcactttgcgcatagctggcactggcatcgggaaggctttcggcaaaggggagatacggtttgatatccactaccggcgtaccatcgaccagatccagactgccgagcttcagaatcacgctgtctttatggcaaacaacctctttcagctctaccaggctcatgccaattgggttagggcggaaagtagagcgtgttgcgaaaacccccattctggcgttaccgccgaggcgcggtggacgcacagtcggacgccagccgccttccatcgtttgatgaaagacgaaaaggatccataaatggctgaacgcttccaggccgcgaacggcgtcggcctggttgtagggagcaatgagatgcagttcgccgttggcgctttttaccagacctggctggcgcggaacggcgaacttttctttataggggctgcgaataacgcctatttgctcgaactggaaactgctcatttcgccgtaatgttaagcgcagaaccgatacatacagcctgacgatagcagcctggcgtaccgctggtgacttcgcagctatgcagtaatacagcattggctttcattttagaggcgttgatttgcatccgcttacgtgcggttggaatgctcggcggagagtcctgattagaggcctggcaagagtcgccactgacttcaccgagatcgcggaacggtttgccgactaattcttctgcattggtataaattcggaccggcgtggcgcgcggcgctttcggttttgcaggctccgctttcggctggggtgcagtgctttgaacgggttcgacaggggatctgcttaacatggaacagccgcttagcatgagtgctactaaacagatcggtaaagcacgcatagtatttcctcaatgtatgatcaaaacgtcaatattgaatcaggagcttgtaaaaatgacaagacgggcaagcgcccgtcctgaatgatattacaaattgtggaaacagcctaaaaattaccagcctttaacagctccgccgttaaacactttgtttgctgcttcgtaaacttcgtcagactgataagcctggacgaatttcttcacgttctcggcgtctttgttatcttcacgcgtcacgatcaggtttacgtacggggactctttatcttcaacaaagataccgtctttcgccggagtcaggccaatctggctggcataggtggtattgataactgccagagcgatttgcgcgtcgtccagagaacgcggcagttgcggtgcttccagttcaacaattttcagatttttggggttctcaacaacatcaagaacggtcggcagcaggccaacgccatctttcagtttgatcaagcccactttttgcagcagcagcagactacgaccaaggttagttgggtcgtttggcacggcaacctggctaccatcctgcagttcatccagacttttgattttcttggagtaaccagcaatcggataaacaaaagtgttgcctactgcgaccagtttgtagccacgatctttcagttgctgatcaaggtacggtttatgctggaaggcgttggcgtcgatatcgcctttgctcaatgcttcgtttggcagaacatagtcgttgaaggttaccagctcaacgtccaggccatatttgtctttcgcaactttctgcgcgacttctgcaacctgctgttcggcaccaacaatcacgccgactttaatgtggtttggatctttttcatcctgaccgcagcctaccagtgccagacttccgatcagggctcccactgccgcaaaggttttgaatttgaacgccataccttattccttcttcaattatttatgttgtgttgaacgttacttgcgagtgacagcccggacgatgcggtcgcctgcgaactgaattaaataaaccagaatgaccagcaataccagtaccgtattcatcaccgtcgcgttatagccgatgtagccatactgatagccaatctgacctaaaccaccggcaccgactgcaccacccatcgcggaataaccgaccagggtaatcagggtgatagttgccgcattcaccagacccggcagcgcttccggtaacagcaccttacggacgatctgcatcggcgtggcacccattgcgcgggaagcttcaattaacccggttgggatctccagcagagcgttctcgaccatacgggcaataaacggtgctgcaccaacggttaacggaacaatcgctgcctgcaaaccaatgcttgtaccgacaataacgcgggtaaacggaatcatccatacaagcaagataatgaacgggatggaacggaaaatgttcacaatcgcagaaacggtacgatacagcttcgcgttagcaataatttgccccggacgcgtgacataaagcagaacgccaaccggcagaccaatcacaaagccaaaaaaaccggatacgaaggtcattgccagcgtttcccatacgccacgaaccagcagccacatcatcggctcagacataacccagtacctctacttttacatggtgttcctgcagccaggcaatggcggcttgcgtatcttgttgtgtgccgtgcatttcagtcagcatgatgccgaacttaacgccaccggcgtaatccatctgcgcgctaataatgttgttgttgacgttgaaacgacgcgcggtttcagaaagcagtggggcatcgacgctttgaccggtaaactccagacgcagcatcggcacgcagtcagtaaatggctccgcttgcagacgttcctggtaatcttccgggatatccagatgcagggtgctctgaataaacttctgcgccagcggcgttttcggatggctgaacacttcacttaccgtgtcctgctcgatcagttctccattgctgatgaccgccacgcaatcacaaatgcgcttcacaacgtccatttcgtgggtgatcaacagaatcgtcaaccccagacggcggttgatgtctttcagcagttcgagaatagaacgtgtcgttgccgggtccagcgcgctggtggcttcatcacacagcaatactttgggattgctggctaacgcacgggcaattgccacacgttgtttctgcccaccggaaagattgctcgggtagctatcatgcttatcgccaagaccaaccaaactcagcaattccgtcacgcgacgtttgacctcgtctttcggtgtgttgtccagctccagcggcagagccacgttgccaaaaacagtacggctagagagcaggttaaaatgctggaaaatcataccaatctggcggcgagctttggtcaactcggattcactcagcgtggtcagttcctggccatcgaccagcacgctaccctcggttgggcgctccagcaggtttacacaacgtataagcgtactcttacccgcgccactggcaccgataacgccataaatttgtccagctggcacatgcaggctgacgttgttcaacgcctggatggtgcgggtgccctggtggaacactttggtgatattgctaagttttatcattgattatttattatcgtcattaagttagtcgtggcatctcgaatgcctgaaacgggcaacgccgtcaatgaaatggatgttaaggcatccagacgtctaaatcaatcaggtttatgcgaagagcactttcttgcaggtcgaaacatgcgatactagcgtcacatgccttattaaggagctataaaaggtggcgaagagcgtacccgcaatttttcttgaccgtgatggcaccattaatgtcgatcacggctatgtccatgagatcgacaactttgaatttatcgacggtgttattgacgccatgcgcgagctaaaaaaaatgggctttgcgctggtggtagtaaccaaccagtctggcattgctcgcggtaaatttaccgaagcacagtttgaaacgctgaccgagtggatggactggagcctggcggaccgagatgtcgatctggatggtatctattattgcccgcatcatccgcagggtagtgttgaagagtttcgccaggtctgcgattgccgcaaaccacatccggggatgcttttgagtgcacgcgattatttgcatattgatatggccgcttcttatatggtgggcgataaattagaagatatgcaggcagcggttgcggcgaacgtgggaacaaaagtgctggtgcgtacgggtaaacctattacgcctgaagcagaaaacgcggcggattgggtgttaaatagcctggcagacctgccgcaagcgataaaaaagcagcaaaaaccggcacaatgattaaaagatgagcggttgaaataaaaatgcatttttccgcttgtcttcctgagccgactccctataatgcgcctccatcgacacggcggatgtgaatcacttcacacaaacagccggttcggttgaagagaaaaatcctgaaattcagggttgactctgaaagaggaaagcgtaatatacgccacctcgcgacagtgagctgaaagccgcgtcgcaactgctctttaacaatttatcagacaatctgtgtgggcactcgaagatacggattcttaacgtcgcaagacgaaaaatgaataccaagtctcaagagtgaacacgtaattcattacaaagtttaattctttgagcatcaaacttttaaattgaagagtttgatcatggctcagattgaacgctggcggcaggcctaacacatgcaagtcgaacggtaacaggaagaagcttgcttctttgctgacgagtggcggacgggtgagtaatgtctgggaaactgcctgatggagggggataactactggaaacggtagctaataccgcataacgtcgcaagaccaaagagggggaccttcgggcctcttgccatcggatgtgcccagatgggattagctagtaggtggggtaacggctcacctaggcgacgatccctagctggtctgagaggatgaccagccacactggaactgagacacggtccagactcctacgggaggcagcagtggggaatattgcacaatgggcgcaagcctgatgcagccatgccgcgtgtatgaagaaggccttcgggttgtaaagtactttcagcggggaggaagggagtaaagttaatacctttgctcattgacgttacccgcagaagaagcaccggctaactccgtgccagcagccgcggtaatacggagggtgcaagcgttaatcggaattactgggcgtaaagcgcacgcaggcggtttgttaagtcagatgtgaaatccccgggctcaacctgggaactgcatctgatactggcaagcttgagtctcgtagaggggggtagaattccaggtgtagcggtgaaatgcgtagagatctggaggaataccggtggcgaaggcggccccctggacgaagactgacgctcaggtgcgaaagcgtggggagcaaacaggattagataccctggtagtccacgccgtaaacgatgtcgacttggaggttgtgcccttgaggcgtggcttccggagctaacgcgttaagtcgaccgcctggggagtacggccgcaaggttaaaactcaaatgaattgacgggggcccgcacaagcggtggagcatgtggtttaattcgatgcaacgcgaagaaccttacctggtcttgacatccacagaactttccagagatggattggtgccttcgggaactgtgagacaggtgctgcatggctgtcgtcagctcgtgttgtgaaatgttgggttaagtcccgcaacgagcgcaacccttatcttttgttgccagcggtccggccgggaactcaaaggagactgccagtgataaactggaggaaggtggggatgacgtcaagtcatcatggcccttacgaccagggctacacacgtgctacaatggcgcatacaaagagaagcgacctcgcgagagcaagcggacctcataaagtgcgtcgtagtccggattggagtctgcaactcgactccatgaagtcggaatcgctagtaatcgtggatcagaatgccacggtgaatacgttcccgggccttgtacacaccgcccgtcacaccatgggagtgggttgcaaaagaagtaggtagcttaaccttcgggagggcgcttaccactttgtgattcatgactggggtgaagtcgtaacaaggtaaccgtaggggaacctgcggttggatcacctccttaccttaaagaagcgtactttgcagtgctcacacagattgtctgatgaaaatgagcagtaaaacctctacaggcttgtagctcaggtggttagagcgcacccctgataagggtgaggtcggtggttcaagtccactcaggcctaccaaatttgcacggcaaatttgaagaggttttaactacatgttatggggctatagctcagctgggagagcgcctgctttgcacgcaggaggtctgcggttcgatcccgcatagctccaccatctctgtagtggttaaataaaaaatacttcagagtgtacctgcaaaggttcactgcgaagttttgctctttaaaaatctggatcaagctgaaaattgaaacactgaacaatgaaagttgttcgtgagtctctcaaattttcgcaacacgatgatggatcgcaagaaacatcttcgggttgtgaggttaagcgactaagcgtacacggtggatgccctggcagtcagaggcgatgaaggacgtgctaatctgcgataagcgtcggtaaggtgatatgaaccgttataaccggcgatttccgaatggggaaacccagtgtgtttcgacacactatcattaactgaatccataggttaatgaggcgaaccgggggaactgaaacatctaagtaccccgaggaaaagaaatcaaccgagattcccccagtagcggcgagcgaacggggaggagcccagagcctgaatcagtgtgtgtgttagtggaagcgtctggaaaggcgcgcgatacagggtgacagccccgtacacaaaaatgcacatgctgtgagctcgatgagtagggcgggacacgtggtatcctgtctgaatatgggggggaccatcctccaaggctaaatactcctgactgaccgatagtgaaccagtaccgtgagggaaaggcgaaaagaaccccggcgaggggagtgaaaaagaacctgaaaccgtgtacgtacaagcagtgggagcatgcttaggcgtgtgactgcgtaccttttgtataatgggtcagcgacttatattctgtagcaaggttaaccgaataggggagccgaagggaaaccgagtcttaactgggcgttaagttgcagggtatagacccgaaacccggtgatctagccatgggcaggttgaaggttgggtaacactaactggaggaccgaaccgactaatgttgaaaaattagcggatgacttgtggctgggggtgaaaggccaatcaaaccgggagatagctggttctccccgaaagctatttaggtagcgcctcgtgaactcatctccgggggtagagcactgtttcggcaagggggtcatcccgacttaccaacccgatgcaaactgcgaataccggagaatgttatcacgggagacacacggcgggtgctaacgtccgtcgtgaagagggaaacaacccagaccgccagctaaggtcccaaagtcatggttaagtgggaaacgatgtgggaaggcccagacagccaggatgttggcttagaagcagccatcatttaaagaaagcgtaatagctcactggtcgagtcggcctgcgcggaagatgtaacggggctaaaccatgcaccgaagctgcggcagcgacgcttatgcgttgttgggtaggggagcgttctgtaagcctgtgaaggtgtactgtgaggtatgctggaggtatcagaagtgcgaatgctgacataagtaacgataaagcgggtgaaaagcccgctcgccggaagaccaagggttcctgtccaacgttaatcggggcagggtgagtcgacccctaaggcgaggccgaaaggcgtagtcgatgggaaacaggttaatattcctgtacttggtgttactgcgaaggggggacggagaaggctatgttggccgggcgacggttgtcccggtttaagcgtgtaggctggttttccaggcaaatccggaaaatcaaggctgaggcgtgatgacgaggcactacggtgctgaagcaacaaatgccctgcttccaggaaaagcctctaagcatcaggtaacatcaaatcgtaccccaaaccgacacaggtggtcaggtagagaataccaaggcgcttgagagaactcgggtgaaggaactaggcaaaatggtgccgtaacttcgggagaaggcacgctgatatgtaggtgaagcgacttgctcgtggagctgaaatcagtcgaagataccagctggctgcaactgtttattaaaaacacagcactgtgcaaacacgaaagtggacgtatacggtgtgacgcctgcccggtgccggaaggttaattgatggggttagcgcaagcgaagctcttgatcgaagccccggtaaacggcggccgtaactataacggtcctaaggtagcgaaattccttgtcgggtaagttccgacctgcacgaatggcgtaatgatggccaggctgtctccacccgagactcagtgaaattgaactcgctgtgaagatgcagtgtacccgcggcaagacggaaagaccccgtgaacctttactatagcttgacactgaacattgagccttgatgtgtaggataggtgggaggctttgaagtgtggacgccagtctgcatggagccgaccttgaaataccaccctttaatgtttgatgttctaacgttgacccgtaatccgggttgcggacagtgtctggtgggtagtttgactggggcggtctcctcctaaagagtaacggaggagcacgaaggttggctaatcctggtcggacatcaggaggttagtgcaatggcataagccagcttgactgcgagcgtgacggcgcgagcaggtgcgaaagcaggtcatagtgatccggtggttctgaatggaagggccatcgctcaacggataaaaggtactccggggataacaggctgataccgcccaagagttcatatcgacggcggtgtttggcacctcgatgtcggctcatcacatcctggggctgaagtaggtcccaagggtatggctgttcgccatttaaagtggtacgcgagctgggtttagaacgtcgtgagacagttcggtccctatctgccgtgggcgctggagaactgaggggggctgctcctagtacgagaggaccggagtggacgcatcactggtgttcgggttgtcatgccaatggcactgcccggtagctaaatgcggaagagataagtgctgaaagcatctaagcacgaaacttgccccgagatgagttctccctgactccttgagagtcctgaaggaacgttgaagacgacgacgttgataggccgggtgtgtaagcgcagcgatgcgttgagctaaccggtactaatgaaccgtgaggcttaaccttacaacgccgaagctgttttggcggattgagagaagattttcagcctgatacagattaaatcagaacgcagaagcggtctgataaaacagaatttgcctggcggccgtagcgcggtggtcccacctgaccccatgccgaactcagaagtgaaacgccgtagcgccgatggtagtgtggggtctccccatgcgagagtagggaactgccaggcatcaaattaagcagtaagccggtcataaaaccggtggttgtaaaagaattcggtggagcggtagttcagtcggttagaatacctgcctgtcacgcagggggtcgcgggttcgagtcccgtccgttccgccacttattaagaagcctcgagttaacgctcgaggttttttttcgtctgtatatctattattgccagaatcgcaaaaatcctctgcattttacgctctttttcctcaacagtctgaagcccataatcacctcagttaacgaaaatagcattaaaagaggcatattatggctatccctgcatttggtttaggtactttccgtctgaaagacgacgttgttattagttctgtgataacggcgcttgaacttggttatcgcgcaattgataccgcacaaatctatgataacgaagccgcagtaggtcaggcgattgcagaaagtggcgtgccacgtcatgaactctacatcaccactaaaatctggattgaaaatctcagcaaagacaaattgatcccaagtctgaaagagagcctgcaaaaattgcgtaccgattatgttgatctgacgctaatccactggccgagtccagacgatgaagtctctgttgaagagtttatgcaggcgctgctggaagccaaaaaacaagggctgacgcgtgagatcggtatttccaacttcacgatcccgttgatggaaaaagcgattgctgctgttggtgctgaaaacatcgctactaaccagattgaactctctccttatctgcaaaaccgtaaagtggttgcctgggctaaacagcacggcatccatattacttcctatatgacgctggcgtatggtaaggccctgaaagatgaggttattgctcgtatcgcagctaaacacaatgcgactccggcacaagtgattctggcgtgggctatgggggaaggttacagtgtaattccttcttctactaaacgtaaaaacctggaaagtaatcttaaggcacaaaatttacagcttgatgccgaagataaaaaagcgatcgccgcactggattgcaacgaccgcctggttagcccggaaggtctggctcctgaatgggattaagcctctctgacagctcctccgggagctgtttttacatgctcgctaaggaaatcgataaaagcccggatgcgcgtacttaccgcacggtcgctgtaatagacggcactgaatggcatttccactggcaacactttatctgccattaactccaccaattctccgcgagcgatttctttgtcgatcatgtagtcggacaaacacgcaatcccgttgccactcaggcaaagctgtttcagtgtttccccactattggaactcaaaccgtacttcacctcatgtaattgtccatcgctacgggctatcggccaggtattgagggaagcgggttcagtgaatcccaggcaaatatgttgctttaaatcgtcgatcgtttctggcttcccgtagcgggaaatataatcgggggaggcgataatttttcgataactgttaaataacggcctggcacgtaagctggaatccgttaacgtaccagcgcgtatcgcgacatccacttttctttcgatcaaattaataatcgtttcggaggagactaggctcaaagtgacttccggatagcgttcacggaaaggcttaattaacggcatcagaaagtgcagcaccactggagttgcggcatcgatccgtaacagtccacgcggtgtattacgcgtctccataatttcactttctgccgctgccatctcctgcaaaatactctgtacgcgacgaaaataacgctcgccttcttccgtcaggctaagttgtcgcgtggtccgattaagcaggctaacgccaagtttcatctccagctttttcaccgcccggcttaccgcactgtttgcttgccctaattgttccgctgcccggctaaagctgccgctttcgacgacgctaacaaaaatggcgagttcttcgctcgtggctttcatttttgctcctgttgcaaaatagaagagatattttgaatttatttgtcattaaaccatcaggatgcgtgatatgtcatgcgatttaatgttctccataatgagcaaaattctgaccggtgtaagcacttgcttacataacaatatacaattgctcgttgaaagagtgagctaaaatccctataacagtagaaccctcccgagtgcggaagggttgacgtaatagaggtttcaaagtcaaaagtgcgaaaaaacacctatgccatgcgctatgttgccggacaacctgcggaaaggatcttaccgccggggtcttttgcgagcatcggccaggcattaccacctggggaaccgttaagtaccgaagagcgtattcggatcctggtgtggaacatatacaaacagcaacgcgctgaatggttgagcgtattaaagaactacggcaaagatgcacatctggtgttattgcaggaagcgcagacaacgccagagttagtacagtttgcgaccgctaactatcttgccgccgatcaggtacccgctttcgtgctgccacaacatccttctggcgtaatgacccttagcgcggcacatccagtgtattgctgcccgttacgtgaacgagaacccattttgcgtctggcgaagagcgcactggtgacggtctatccattacctgacacccgcctgttgatggtggttaatatacacgccgtcaacttcagtctgggcgtggatgtctatagtaagcagttacttcctattggcgatcagatagctcaccacagcggcccggtcattatggcgggagatttcaatgcctggagccgtagaaggatgaacgcgttatatcgctttgcgcgggaaatgagcctgcgccaggtgcgttttaccgatgatcagcgccgtcgggcgtttggtcgcccgctcgattttgttttctaccgtggtctgaacgtcagtgaagcttctgtactggttacgcgcgcttccgatcacaatccgctactcgttgaattcagtcccggcaagcctgataaataaggtatgagtggtctgccacagggcagaccaacgtttggcgctgcgcaaaacgtgagcgcggtggtggcgtatgacttatctgcccacatgctggatgtcgtggcacaagctgccgaagcccggcaactgaaaaatatcaccacccgccagggatatgccgaaagtctgccatttgccgataacgcatttgatattgttatcagccgttattctgcccatcactggcatgatgttggtgcagcactgcgagaagtgaataggatattgaaacctggcggtaggctgattgtgatggacgtaatgtctccgggtcacccagtgcgcgacatctggttacagacggtagaagcattacgcgatacctctcacgtacgaaactacgccagcggtgagtggttgacgttaatcaatgaagccaatctgatagttgataatttaattacagataagttaccgctggaattttctagttgggtcgcgagaatgcgtacgccagaagcgttagtagacgctattcgcatttaccaacagagcgcaagcacagaggtgagaacgtattttgccttgcagaatgatggctttttcaccagtgatatcatcatggtagatgcacataaagcggcataaataaaaaaggcaccgggggaatcggtgcctttttattatctggtttgtcaggaatctggcatgttgttgtttttcacaaacaacgtcagcttatcgcctggttgcagattcgcagtgtcgctgttccagcgcatcacatctttgatgttcacgccgtggcgtttagcaatgctactaaggctatcgcctttgcgcacacgatacgtaatgctatcgctgttgtttgccagtcgctgtgcgctactgcctgcaccaatcgtcaaactttggcctggcttcagcttagatccgcgcagtttgttccactgctgcaaatctttggtgcttacgccgagacgactagcgatactactaagcgtgtcgccagagcgtacggtgtaaacacggctgttaagcggcgtattgtcggcaaccagcgtgctctgtacagcagcaatttcgccactagccagagattcacgcagttgatctgcatgcttctttggcaccatcacgtactgcgggccacttgcgcccagcgtggagccttttacgccagcgttgaatgtcttcagcttgctgacggaaatccccgccatatctgctaccttcgccatttcaaccgggctgctcaggtgcacacgcgccagagcacggctttcatcggtcgttggcagacgtacgccataacgcttgctgtttttgagaatatcactcaatgccagcattttaggcacgtactgcttcgtttcctgcggcaacggtaagctccagaagtccgtggatttcccacgcgctttgttcgttttaattgccttcatgacccgaccttcgccgctgttataagccgctacggtcagaagccagtcgccgtcaaacattttgttcagacgctgcatcatattcagcgcggcagttgcactagcaacaacatcgcgacgcgcgtcataattgcgggtctgtttcaaaccataattgcgccccgtgctcggaatgatctgccagatgcctgcggcattggcgccagacgttgcgtgaggatcaaaagcgctctccactatgggtagtagtaccagttccataggcatgttacgttttttaacttgccctgctatccagtacatatacggctctgcccgtaaagttacatcgtggagatagctcttattgcgtaaatatttctgtttctgttcgcgaatccggtcattttccggaattcccatctttagctcgtcgccaatgaaagcccacaagtcaccatctggcgcgatagacgtcccatcgtccatccatcgtgcctgacttgtaaactttgctgcttccccttgaccagctgcagaaaggctctgtgcgtgctgttgaacgttgccggtactctggcaacccacgagcaggacagaggcgagtaatatcgcttttgccttcatgtgtgtgtcaatagttgcttaaaagacgaccgatcataacggcgaacggagccgatgacaagaaagttttatcagaacctatctttcttactccttaaccatgcaaaacgctcttcaggttgttgcaataatgtttcttcattaattacattaattaaatcaatatcttccgttcttaaaaaaacattaatttgccgctcatttttcagaattacgggtagtgttatttgattttttgcccgtaactccttaactttacgataataatcatttatggacaaatcgtgcggaagaatactcaaagcaaacttcatattacttaaggtatattcatgagcacaacataccaatgtatcgtcaggtaacgcacttaactttttaagactttgatacatttgacttgctgtcccttcaaacaaccgaccacacccaccagaaaacagtgtgtcgccgcaaaatagataaggtttactgaagtaacagatatgtcctaaagtgtgacccggcgtagcaattacactaaattcatgccccaaaacgaaggcagtttcgccatctttgactacctgtgttgttcccttatcttgtgtctcttgtggaccatacaccacaatttgtggaaacttttccaccagttcttttacgccgccaacgtgatcgtggtgatggtgggtgagaaatatggcctccggttgccagttattggcggcaatggcgtttaatactggctctgcgtctccgggatcgacaatcaggcagcgacctgcttcatcattcaaaacccagatgtaattgtcatcaaaggcgggaatactgttaagattcatagattacctctcagtgtgaaacggaaggttgtgatgaaaccggcaagagtccctcaaactgtcgtggctcctgattgctggggcgatttgccctggggaaagctttatcgcaaggcgctggagcgccagctcaacccgtggttcactaaaatgtatggttttcatctgcttaagattggcaatttaagcgcagaaatcaattgcgaagcgtgcgcggtttctcatcaagtgaatgtttctgcgcaaggaatgcccgtccaggtacaggcggacccacttcatcttccttttgccgataaatccgttgatgtttgtctactggcacatacattgccgtggtgcaccgatccgcatcgtttattgcgtgaagccgatcgggtattgattgatgatggctggctggtcattagtggcttcaatcccatcagttttatgggattacgcaaacttgtgccggtattgcgcaaaaccagcccctataacagccggatgtttactctgatgcggcagctggactggctctctttgttgaattttgaagtgctacacgccagccgtttccacgttctcccgtggaacaaacacggaggaaaactattgaatgcgcatattcctgcgcttggttgcttacaacttattgttgcccggaaacggactattcctttaacgctaaatccgatgaaacagagtaaaaacaagccacgaattcgccaggcggttggagccacccggcaatgtcgtaaaccacaggcttaaacttcaacttggtagcctgtatcttccagtgtgggattcatcgccgcggcacgagccagttcatcacagcgttcgttttccgggtgtccggcatggcctttaacccattcccatttgatttgatgctgccccaatgcagcatcaagacgttgccagagatcgacattttttactggttttttgtctgcggttttccagccacgttttttccagttatggatccactgggtgataccctggcggacatactggctgtcggtactcaaaatgacttcgcaatgttcttttaacgcctccagcgcgacaatagcggccatcaactccatacggttgttggtggtgcgggtgtagccagcgctaaaggttttctcgcgtccgcgatagcgtaaaatagcgccgtaacccccaggtcctggattgcccagacagctaccatcggtgaaaatttctacctgtttaagcatctctggtagacttcctgtaattgaatcgaactgtaaaacgacaagtctgacataaatgaccgctatgagcactgcaattacacgccagatcgttctcgataccgaaaccaccggtatgaaccagattggtgcgcactatgaaggccacaagatcattgagattggtgccgttgaagtggtgaaccgtcgcctgacgggcaataacttccatgtttatctcaaacccgatcggctggtggatccggaagcctttggcgtacatggtattgccgatgaatttttgctcgataagcccacgtttgccgaagtagccgatgagttcatggactatattcgcggcgcggagttggtgatccataacgcagcgttcgatatcggctttatggactacgagtttagcttgcttaagcgcgatattccgaagaccaatactttctgtaaggtcaccgatagccttgcggtggcgaggaaaatgtttcccggtaagcgcaacagcctcgatgcgttatgtgctcgctacgaaatagataacagtaaacgaacgctgcacggggcattactcgatgcccagatccttgcggaagtttatctggcgatgaccggtggtcaaacgagcatggcttttgcgatggaaggagagacacaacagcaacaaggtgaagcaacaattcagcgcattgtacgtcaggcaagtaagttacgcgttgtttttgcgacagatgaagagattgcagctcatgaagcccgtctcgatctggtgcagaagaaaggcggaagttgcctctggcgagcataaatacctgtgaaaggcgctaaaaatagcgacttgggcgatttttgcagcaaacgattcaaaagatgagaaaaaccgttgacgaaggtcgaggcaatccgtaatattcgcctcgttcccaacggaacacaacgcggagcggtagttcagtcggttagaatacctgcctgtcacgcagggggtcgcgggttcgagtcccgtccgttccgccactattcactcatgaaaatgagttcagagagccgcaagatttttaattttgcggtttttttgtatttgaattccaccatttctctgttcaatgattttactctggcgtaggtgcgtgattctcgcttgttgtctcattcattaaaattcaataatgatatcgaaccattcagcttaaatatatttctagagaataaatttatattgattaaatgaatgtatatttcaaattgattttgtttgttattatttaagtgaggtatataattagagtccgttatcaatgctaaatattctaatcattatgacaggcgagggagtgtccaattatgaatagtaaaaagctttgttgcatatgtgtgttattcagcctgcttgcaggatgtgcctctgaatcttctattgatgaaaagaagaaaaaagctcaagtcacacaaagtaatattaataaaaacactccccagcaactgacagacaaagatttattcggtaatgaaaccactctggccgtatccgaagaggatattcaagctgcgcttgatggagatgagttccgcgttccccttaattctcctgtaatacttgttcaatccggcaaccgcgcaccggaaaccattatgcaggaggagatgcgaaaatattatactgtttccacattctctggtatcccggacaggcaaaagcctctgacttgtaacaaaaacaaagataaaaatgagaacgaggatgttgccagtgctgagaatatgaactggatgcaggcactgcgttttgtggctgcaaaaggacatcagaaagcgattattgtttaccaggatatgttgcagacaggaaaatatgactctgcgctgaaaagtacagtatggtccgactataaaaatgacaaactcactgacgctatctccctgcgctacctggtacgtttcacgctggtggatgtggcaacaggtgagtgggctacctggagcccggtgaattatgaatataaagtgcttccaccattgcccgacaagaatgaagccagtacgactgatatgacagagcagcaaatcatgcaacttaagcaaaagacctataaagcgatggtaaaagatttggttaaccgctatcaataataaattatatctgccgccaggaatttctggcggcaataatacaaaattctttgcataagaaatttttcttgacaaagacagtgcaagaaaggacatggaatccggagttaaaaactgtttgttttagaatatttaattatttaactgctgaatcttccttgcgagaaatatatccattattacatttcatgccatttttaatatagattgctcctgggaaaattcccgtattattaccgcaggggtgataattagtattgacatatcctgtgacaaaaggagctattaaaggtgctattacgatagctattagtaaaaatataagagttagctgtattgttatgtctgtggcgaaattgactaccttcgtttttttgattaagaatgattttattatcgtaagtaaaattacatgaatatttaaaaaggaaaacgacatgaaaccgaagcacagaatcaacattctccaatcataaaatatttccgtggagcattttattattgaatatagaggtttaactccggtaaaaaacaaagaagcattgaatgcagggaaaaataatatggccataaaaaacatcgaaagaaactcttttaatttaacatgtaaacgcatggttaatcctcatatcacgggtggagtgttaagaacatacataaatggagtcatgttttcccttttccatttatcaagttcctgttgccgttttagtccatctctaattgcatattttaatttttcacttaaatggcattgagcatcgatttcatttaaaacaactgtacacactatccctgtcagtaaaattgctcctccgacaagaattactggaaagccaaagctaacacaggcaaaagaagccagacttccaatagcggttgcaacaccaccggctataactgctttggccacatccatactaaaatcgccaagaaaattaaccagatctcgctcactactcataataaattctatggttctgctgatttaaccgcagagaagttcgccacagcaatccgaaaccactggcacgtggagaataagctgcacaggcgtctggacgtggtaatgaatgaagacgactacaaaataagaagaggaaacgcagcagaattatttagtgggatacggcacattgctattaatattttgacgaatgagaaggtattcaaggcagggttaagacgtaagatgcgaaaagcagccatggacagaaactacctggcgagtgtccttgcggggagcgggcttagctaataataccccgactctccccgtccttaaacacaacccccactcaccacaacctaaactcatccgcatcctgccatgccggaaacttttctctatattcccgcaatgctgccatgctcagctccgcatcaatgcgcgttgcctgatgcgcgtcggcagtagcgataatctctccttgcggattaatcacccggctgtcaccgcgataatggcagccgttgccatcgctgccgacgcgattgcatcccgccacatacgcctgattctcaatcgcgcgggccgtcagcaatgcctgccagtgcagagagcgcggagcaggccagttggcgacgtacagggcgaggtcataatcgttgagattgcggctccacacaggaaaacgtaagtcgtagcacaccagcggcaaaatacgccagccgcgccattccacaatcactcgcgcattgcccgctttataatgtagatgctcatctgccatgcggaacagatgacgcttatcataaaaatgtaccgtgccgcccggctcaaccagcaaaaagcggttaacgctaccagactccgtttgtaatgcaacactgcctgcaatcagcgcattgcactgctgcgccttagctgtcatccagttcactacgtcatcttgtgctaggctgctagctgccgcttccatggcaaagccgctggtaaacatctccggtagaacgatcacatcgcgcccggtaataccttccagttgacgatcaaaatgacgcaggttggcaggaccatccatccacaccagtggttgctgcaaaagcgtaatcttcaaaccaggcacggtgtacaactcctttatgcgaagggttttataactttaacaccttatcaggcagttgccttagcgcagaataaattgataacaaatgctgatattggaaatatctgatttgcaaattatcgtgttatcgccaggctttaggaggttaataacatgggcaggataagcagcggaggaatgatgtttaaggcaataacgacagtcgccgctctggtcatcgccaccagtgcaatggcgcaggatgatttaaccattagcagccttgcaaagggcgaaaccaccaaagctgcatttaatcagatggtacaagggcataagctgcctgcctgggtgatgaaaggcggtacttatactcccgcacaaaccgtaacgttgggagatgagacgtatcaggtgatgagcgcgtgcaaaccgcatgactgtggcagccaacgtatcgctgtgatgtggtccgagaaatctaatcagatgacggggctgttcagcactattgatgagaaaacgagccaagagaaactcacctggctgaatgtgaacgatgcgcttagcattgatggtaaaacggtgttgttcgcggcgttgaccggcagcctggaaaaccatccggatggctttaattttaaataattagcggataaagaaacggagcctttcggctccgttattcatttacgcggcttcaactttccgcactttctccggcaactttaccggcttcgtcgccagctcttccggatcaaagtcatcaacgttaatactgcgcagacggctttcttcagctttcaccagaatagcggcttcatctttatcaatcagccccttcaccagcgcgttgtgcgccagttcatccagacgggtaaacggcaggtttttacccagctctttacagatccgctgatgaattgggtcggcggcaatcacatccaccagcgcctcttccagcaagccaaccggattatgctcgctcggcgtcaggtactgaccgcgaccaatgcgggaacgggtggcgttcggcacttgtaaaatcttcgccactttatgatccagcttgtcagaaggtgccagataatgacgtccggtcgggaagatcaccacattcagcagcccggcaaccacgcggttcgggaagttttgcagtaaatcatccatcgcctgttcagcctgatacagcgcatcttgtacgccccagtgcaccagcggcaggtcggcttcattacggccttcgtcgtcataacgcttcagcacggcagaggcgaggtagagctggcttaaaatatcccccagacgggcgctgatgcgctcgcgacgtttcaggctgccgcccagcactgccatgctgacatcagaaagcagggcgaggttggcgctcaggcggttcaggtgctgatagtagcgtttagtggcatcgccggttggcgtgctgctggttaaaccgcgcgtcaggcccagccagaagctgcgaactttgttgctaccgacgtgaccgatatgtttgaacaacagtttatcgaacgcgttgacgtcattgttcttcgccgcttccatctcttccagcacgtacggatggcaacgaatcgctccttgtccgaagatcatcatgctgcgggtcagaatgttagccccttcaacggtgatggcaatcggtgcgccctggtaagcacgcgccaggaagttgctttgcccgagcataatgcctttaccgccggtaatatccatcgcatcaataatgttctgctgcccgcggtgggtacagtgatacttaacgatagcgctcagcacggcaggtttttcgccgagcataatgccgtaggtaatcaggcttgccgcagcatccatcacgtaggcattaccggcaatacgcgccagcggctcttcaatcccttccatcttaccaatagagattttgaactgacggcgaatgtgagcatacgcgccggttgccagcgctacgcttttcacgccgccggtactgttggaaggcagggtgatgccgcggcctacgctgaggcactccaccagcatccgccagccttgcccggccattttcggcccgccgatgatgtaatcgatcggcacgaagacatctttaccgcgcgtcggtccgttctggaacggtacgttcagcgggaagtggcgacgaccaatttccacgcccggcgtggtggttgggatcagcgcacaggtaatgcctaaatcttctgcaccgccgagtaatttttccgggtcggagagtttaaacgccagcccaagcacggtcgcaatcggtgccagcgtaatgtagcgtttgttccaggtcagacgcatccccagcacctgctggccctgccattcgcccatgcagacaatcccggtgtccggaatcgcgcccgcatcggaacccgcttccgggctggtcagtgcaaagcaggggatctcctgaccacgcgccagacgcggcagatagtgatctttctgctcgtcagtgccgtaatgttgcaacagttcgcccgggcctaaactgtttggcacgccgacggtaatcgccaggatcccgctcacgccggagagtttttgcagcacgcgagactgggcataagcgctgaactccagcccgccgtactcttttttgatgatcatcgcgaagaaacgatgctctttaaggtacgcccacaactccggcggcagatccgccagctcatgggtgatctggaaatcattcgccatccggcaggcttcttctaccgggccgtcgagaaacgcttgctcttcggcggtcaggcgcggctgcggatagttatgcagctttttccagtccggcttgccctggaacaagtcgccctcccaccaggtggtgcccgcatcaatcgcttctttctcagtgcggctcatcggcggcatcaccttacggaaaccgcgaaataccggcgcggaaatcatgctcttacgcataggcgcaaagttaaatggcacgaggataatggccagaggcaccagtacccacgcgctccacagaccagcaacgccgagggcggctgtccaggcgagcaaaatcagactgctgataaataagctcacgcggtgatagaacaacgcgccgagcaggacaaccgtagcgagaatactcaaaatcatcataacgaaaagccccttacttgtaggaggtctgaccacttgtgatgatatggttgtagtggatgtaaaaacatttagcaatatgtttacaatataattacaacaaagctcacattgttgctgtttttatccgcacttcaggtcaaaaagtcctggtcatagcacctgcccgtacttctcgcttttggcggtatccggtacactgcattttgtctattacatttatgctgaaggatatcctcatgtaccaggatcttattcgtaacgaactgaacgaagcggcggaaacgctggctaactttttaaaagatgacgccaatattcacgccattcagcgcgcggcggtcctgttagcagacagctttaaagccggtggcaaagtgctttcctgcggcaacggcggttcccattgcgacgctatgcactttgccgaagagttgaccggtcgctaccgtgaaaaccgtccgggctacccggcgattgctatttctgacgttagtcatatttcctgcgtcggtaatgatttcggtttcaatgatattttctcccgctacgttgaagcggtaggtcgcgaaggcgatgtactgctggggatctccacctccggtaactctgcaaacgtgatcaaagcgatcgcagcggcgcgtgagaagggaatgaaagtgatcaccctgaccggtaaagacggcggcaaaatggctggcacggcggatatcgaaattcgcgtaccgcactttggttatgccgaccgcattcaggagattcacattaaagtgatccatatcctgatccagttgattgaaaaagagatggttaagtaagtctggcgtaggccggataagacgtttacgccgcatccggcatttgtgcgctgatgcctgatgcgacgctgacgcgtcttatcatgcctacaaatctgtacgcgaaccgtaggccgaataatgcgttcacgccgcatccgacctgaaaattcttaaatcaatcttcgccgggggccatgcgctcccgctgttgtggaggttacccatgtgcgaattgctcgggatgagcgccaacgtccctaccgatatctgctttagtttcaccgggcttgtacagcgtggtggtggaaccgggccacataaagatggctggggcattaccttttacgaaggtaaaggctgtcgcacatttaaagatccacaacccagctttaattcccccatcgccaaacttgtccaggactacccgataaaatcctgtagcgtggtggctcatattcgccaggctaatcggggcgaggtggcgctggaaaatactcacccatttacccgcgagttatgggggcgtaactggacttatgcccataacggacaactgacgggctacaaaagtctggaaaccggcaacttccgcccggtaggcgaaaccgacagcgaaaaagccttctgctggctcctgcataaattaacgcagcgttacccgcgcacaccgggcaacatggcggcggtatttaaatatatcgccagtctggcggatgaactgcggcagaagggcgttttcaacatgctgcttagcgacgggcgctatgtaatggcgtattgcagcactaatttacactggatcacccgccgcgcgccgtttggcgtggcaacgttgctggatcaggatgtggaaatcgacttcagcagccagaccacaccgaatgatgtggtcacggtgattgcaacacagccgctgacgggcaatgaaacctggcaaaagattatgccaggcgaatggcgcttattttgcctcggggagcgtgtagtttgattattttgcctcggggagcgtgtagttacttgccagttgtggctgcacaacttcgtggcttaacggcttgctgaccacgtaacgaccattgaccacagaaacggttggtggcttacgggtttgctcaaagtagtcgtaacccggcttcagttgctcccagaagtccttaaagttggaatatttatggcgcttcatattggcgtcggtcatgcggaacgggtaaatactcacttgcacgctcggctgaccaaacaccagcgcaccagtaacgaactggaatatctcatcaataccctgattggtcattgcgtagcagccgatggaaacacaatcgccgtggatcatcaggtatttcccttcataaccatgcgcacggtcataggcattggggaaaccaatattaatcgctttgtagtaacggctgtctggttttaactgattacgctggacgctataaaacccttccgggcttttgaaatcgccctgacgctgttttggccctaagccgccggaatatttacagattttatagctgtcgagcagttgatattgctcgcccattttgacgtagagatcgagcgtacgttcttccttgaagatctggatgtagacaggggatcccatcaactgctgcttatactctttgctcacaggcgtggtagagctactgctgcccagcaaaccggcaaaactaacgcacgggatcaacaacatcgcaagaattaatgcgattttacgcatactgcttattccttgataaaacggttacacacgccaggacggcaaaatggatcccaaatcggaatagtctggatttggaaggctcacattatcaccaaaagagttttacgcaagcctgtcggcgcagggtttacaaatttcatcggaagcgggctttacccaaagagcgccgcgtgagttccagttctctcaaatcgtaaaagtttatcggtaagtttgtaaatcaggatccagtccggttcgacatgagcatcgcgataacctttccaactaccttgcagcgggtggtctttataaacagctggaagcggtaaagtattattgataagaagcgtcataagatatttcaatttattcatatccttatgacgcttttgtgcaagttttacatccttactatattgtccgctgtattcaatatccctttgaatcatatttaaattcctaatttatcaaataaatcatcggcgtctttggccttatgaacatcaatgccagcttcgctgtttttgatactttgaatggttaattgattaggctcgcgtaaatcaaacggcaatgccttttcacgcgcgacctttgtgagggttatgcgaaccaggtcagagatggtcagccccatcccggccagtacgtccgctgcctgattcttcagatcttcatcgattcgggcgcgaacaaacgcgttagcagccattggggtatctcctgtgctgtatatttattcagcttgaattgtagctcaaatgagcaacagcgacaatccatgagtaatttaataaacggatgtttttacataattaactgaaatatatatgttaattttataataatggtttattaagtttgttcagaaacgatccgggatacactgcaacattaaagcatgaccagccattattgagtatgtccttgccgagcattccatcctttgtattgagcggattactgttgatttgtttgccgttttctagttttgccagcgccaccacaagtcatatctctttcagctacgccgcccgccagcggatgcaaaaccgtgcgcgtttattaaaacagtaccaaactcatctgaaaaagcaggccagctatattgtggaaggcaatgccgaaagcaaaagggcgctacgccagcacaaccgggagcagataaaacagcatccagaatggtttcctgctccgctcaaggcgagtgacagacgctggcaggcgctggcggaaaacaaccactttttaagcagcgaccatctgcataacattaccgaagtggcgattcaccgcctggagcagcagcttggcaagccttacgtctggggcggtacgcggcctgataaaggctttgactgtagcgggttggttttttatgcctacaacaagatccttgaggctaagctcccgcgcacggccaatgagatgtaccactatcgccgggcaacgattgtggcgaacaacgacctgcgccggggagatttgctgtttttccatatccacagccgcgagatagccgatcatatgggcgtgtatttgggcgatgggcaatttatcgagagcccacgtaccggcgaaaccattcggataagccgattagccgaacctttctggcaggaccattttttgggcgcgcgcaggattttgacggaagagacgattttgtaagacggataaggcgtttacgccgcatccggcagttgtacgcaggtgcctgatgcgacgctggcgcgtcttatcatgcctacgagcccgcgaatatttgcgagccgctttcccgatataaaacaacctcattgccaacctttccttttcttcttaccgttgagaaaaaggagtcgccatgtctgaatatcgtcgttattacatcaaggggggaacatggtttttcacggtgaatttacgaaatcgtcgaagccaacttttgaccacccagtaccagatgctccgtcacgccattattaaagttaagcgagacaggccttttgaaatcaacgcctgggtcgttttgccagagcatatgcactgtatctggacattacctgaaggcgatgatgatttttccagccgctggcgggaaattaaaaagcaatttacccatgcttgtggattgaaaaatatctggcaaccacgtttttgggagcacgccatccgcaataccaaagattataggcatcatgttgattatatttatataaatccagtaaagcatggttgggtaaagcaagtgagtgattggccattcagtacgttccatcgcgatgtcgcgcgagggttatatcccatcgattgggcgggggacgtaacggattttagtgccggggagcgtatcattagttaattgtgcgcagatgcctgatgcgacgctagcgcgtcttatcatgcctacaaacttgtgccggatcggtaggccggataaggcgtttatgccgcatccggcagttatgcgcagatgcctgatgcgacgctggcgcgtcttatcatgcctacaaacttgtgcctgaacggtaggacggataaggcgttcacgccgcatccggcagttgtgcaccaatgctggatacttacatcaacgcccccataatcttcaactccagctcatccggcacttcgttatacgacagcacatgcagccccggcgcaaacaaccttgcataacgcgccagcaaagggcgcagctgcggtggcaccagcagcaccgggtctttccccgccgctttcatctgctctttcacctgtggcatcgtactctggaactggttgagcatattcggatcgaccggcacgctgtcgagcatcactttcccgccctgttgcgcctgattcaccacgttggtcagcagattttccagctcattattcagcgtatacaccgtcagctcctgcttgcgaacgaacggatgggtaatgctgcgccgcaatgccaggcgcacatcggccgccagcagaatatgatctttcgtcaccgtgctactggcgaccagcacggtggcgatggtgacgatatcgcgcagggaaacgccttcggtcagcagcgcccggtacactttcagcaactggctgtaattgagcgccgcgctcaaatcttccgccagacgcggtgccgtcgacgataaacggttatgcaactgcgtaatatcatcatagttaaacaaatcaggaatatagctgcgcacaatcttatttacatgggtagcgatcacgctggcgctgtcgatcacctgataccccatattcagcgccttcgctttctgcgccgcctggatccaggtgaccggcatcccgtacgccgggtcgttcccctgcacgccgtcaatctcgccgtaggtttcgctggagggcagggccatcagtttatccgccggaatatccgcttcatcagcctttatgccgttgatgaaaatggcgtactgactgggcttaaggcggaagttttcccgaatgcggatctccggcagcagcacgccgttgccgtcagaaatcacctgccgcacgccgcgaatccgctgggtgagcgggttaccctgtgctttgtccaccagcgccaccagtttgtaaccgaggcttaaactgataggctcgatcagcggaatggtttcccaactgacctgctgctcgctggtttcggtgatggtgcgggtcagcgtttcgaggcttttctcttccgcctccgccgccagcggctgtttgctcatccgccagccggtaaaaccaagcagggcgctgaacagcaaaaacggcaggtgcggcattcccggtaccaccgccagcacgaacataatcccggtggcggtgtagagcaccgacgggcttgccagcagctggttacgcacgtcatgggcgatatcgccgttgtcgctgacgcgggtgacgataatcgccgccgcggtggagagcagcagggaagggatctgcgccaccaggccgtcgccgatggtcatcagcacatactgctggaaggcagcatcggcgctcaggttgtatttgaagatcccgatacagacgccgccgatcaggttgatcgccagaatcatcatcccggcgatggcgtccccgcgcacaaacttcgatgccccgtccatcgcgccgtagaaatcggcctcgctggcaacatctttacgccgggtttgcgcctgcgcctggttgatcaatccggcgttaagatcggcgtcaatcgccatctgtttgccgggcatcgcgtctaaggtaaagcgggcagaaacctcggaaatacgctcggcccctttggtgacgacaataaagttgattgtcaacagcgtcagtaaatccgagcgtgaaagcattatcgccgcgctgcacgggcagtcgatttttaacggtggtgggctgtcgccgttaaataaaatcagcccgtctcatccgccaaaacctgccaccgtggcggtgccggaagagacggagaaaaaagcgcgtgatgtgaatgagaaaacggcgctgctgaagaagaaatccgccaccgagcttggtgagctggcaaccagtatcaacaccattgcccgtgatgcgcatatggaagcgaatctggagatggagattgttccccagggattacgcgtgctgattaaagacgaccagaaccgcgatatgtttgaacgcggcagcgcgaagattatgccgttctttaaaacgctgctggtggagctcgcgccagtgttcgactcgctcgataataaaattattattaccgggcataccgatgcgatggcctacaaaaacaatatctacaacaactggaacctttcgggtgaccgcgcgctttcggctcgtcgggtgctggaagaggccggaatgccggaagataaagtgatgcaggtaagcgcaatggcggaccagatgctgctggattccaaaaatccgcaaagcgcgggcaaccggcgcattgagattatggtgctgaccaaaagtgcgtccgatacgctgtatcaatactttggtcagcatggggataaagtggtgcagccgctggtgcaaaagctggataagcagcaggtgctttcgcagcgaacgcgttaaatgctgaatctttacgcatttctcaaaccctgaaatcactgtatactttaccagtgttgagaggtgagcaatgcgtaaaatcattcatgtggatatggactgctttttcgccgcagtggagatgcgcgacaatcccgccctgcgcgatatccctattgctattggcggcagccgcgaacgtcggggggtgatcagcaccgccaattatcccgcgcgtaaatttggcgtacgtagcgctatgccgacagggatggcgctcaaattatgcccacatctcaccttgcttccggggcgctttgacgcctacaaagaagccagtaatcatatccgtgaaatcttcagccgctacaccagccgcattgaaccgttgagtctggatgaggcttatctcgatgtcaccgatagcgtccattgccacggttctgcgaccctcatcgcccaggaaatccgccagacaatcttcaacgagctgcaactgacggcgtctgcgggcgtggcaccagtaaagtttctcgccaaaatcgcctccgacatgaataaacccaacggccagtttgtgattacgccggcagaagttccggcatttttacaaaccttaccgctggcaaaaatccccggcgtcggcaaagtcagtgcggcaaaactggaagcgatggggctgcggacctgcggtgatgtacaaaagtgtgatctggtgatgctgcttaaacgctttggcaaatttggccgcattttgtgggagcgtagtcaggggattgacgaacgcgatgttaacagcgaacggttgcgaaaatccgtcggcgtggaacgcacgatggcggaagatattcatcactggtctgaatgtgaagcgattatcgagcggctgtatccggaacttgaacgccgtctggcaaaggtaaaacctgatttactgattgctcgccagggggtgaaattaaagttcgacgattttcagcaaaccacccaggagcacgtctggccgcggctgaataaagctgatctaatcgccaccgcgcgtaaaacctgggatgaacgccgcggcgggcgcggtgtgcgtctggtggggctgcatgtgacgttgcttgacccgcaaatggaaagacaactggtgctgggattatgatgtatactattatgtatattctggtgtgcattattatgagggtatcactgtatgcatcgaattctcgctgaaaaaagcgtcaatatcactgagttacgtaaaaacccagctaaatactttattgatcaaccggttgcggttctttctaataatcgccccgcaggatatctcttaagtgccagcgcattcgaagcgttaatggacatgcttgctgaacaagaggagaaaaagcccataaaggcgcgcttccgtccaagtgctgcaagattagaggaaattacacgccgcgctgaacaatatcttaatgatatgacggatgatgatttcaatgactttaaggaataaggatgcgggtattcaaaacaaaacttattcgcctgcaacttacagcagaggaacttgatgcgttaacggcggattttatttcctataagcgtgacggtgttttgccagatatatttggtcgcgatgcactctacgacgactcctttacctggccattaatcaaatttgagcgagttgctcatattcatctggcaaatgagaataatccatttccgccacagttgcgccaattcagcagaacgaatgacgaagcgcatttggtatattgtcagggggcgtttgatgagcaagcatggttgctcattgccattctgaaacctgaacctcataaactggctcgagataacaaccaaatgcataaaattgggaaaatggcagaagcgtttcgcatgcgtttttgaatttatattatgaataacatacaaataagaaactatcagcctggcgattttcagcaactatgcgctattttcattagagcggttacgatgaccgccagtcagcattatagtccacaacaaatttccgcctgggcgcagattgacgaatctcgctggaaggagaaactcgcgaaaagtcaagtgtgggttgcgatcattaatgcacaaccggttggttttatttcccgcattgaacattatatcgatatgttatttgttgaccctgaatacacccgccgtggggttgccagcgctttgttaaaacctttgattaagtctgaatccgaacttacggtggacgcaagcataaccgcaaaacccttttttgaacgttatggttttcagacagttaagcagcagcgcgttgaatgccggggagcgtggtttactaatttttatatgcgatataaaccgcaacattaaatccagcttgcaatgaaaataacgcccgcctggtatgtgcgcgttttctgattccacaaactgcaaggaggtaaatcatgacaaatcctttatcaatgactctttgcagacctttccaggattaattctttttttcttgccctggattcgtctgccatttcctgatttttatatttatatactctaaataattcgagttgcaggaaggcgacaagcgagtgaatcgccaggagcttacataagtaagtgactggggtgaacgaacgcagtcgcagtacatgcaacttgaagtatgacgagtataaatggaatggtacatgggcaaatatattcgtcccttatccgatgcggtatttaccatcgcatctgatgacctgtggatcgagagtttagcgatccaacaattacacaccacggcaaatttacccaacatgcagcgcgtagtggggatgccagatttacaccccggacgcggctacccgattggcgcagcgttcttctctgttggtcgtttttacccggcaagacgtcgcggtaacggtgctggaaacagaaacgggccgctactctgacacactgcgtagcgcgctggtttctctcgatggcgataacgcatgggcattaagcgaaagctggtgtggcactattcagtggatttgtccgagtccgtatcggcctcatcatgggcgcaaaaactggtttctgggcattgggcgttttaccgctgatgagcaggaacaaagcgatgcaatccgttatgagacgctgcgtagcagcgggccgggcggtcaacatgtcaataaaaccgacagcgcggtacgcgccacgcatttggcatccggtattagcgtgaaggttcagagtgagcgtagtcagcatgctaacaagcggctggcacgattgctgattgcctggaagctggagcaacagcaacaggaaaatagcgcggcgctgaaaagccagcggcgaatgttccatcaccagattgaacgtggcaacccgcgacggacatttacagggatggcttttatcgaaggataatgaaggatgaaactgccggaaggcgattaaacgccatccggcagcaaatcaaataattacttcgccggaatttctttcagcagttcagtcagcagtgtccagtaatgacctacgctttcgatgtgaacttgctcatccggagagtgtggaccggtgatagttggcccgatagaaaccatgtccatttccggatacggttttttgaacagaccacattccaggcccgcgtggataatctggatgttcggcgtcttgttgaacaggcgctgataggtttcacgtaccagatgcatcaccggagaattagcgtccggctgccagccaggatatgcgcctttcgcttcggttttcgcgccagccagtttacccaggctatccagcatgctcaccacgtagtctttaccgctgtcgatcagactacggatcaggcagtgaatttctacgttattgtcagtcatggtcaccacaccgacgttcagggaggtttcaaccacacctttggctacatcggagttacgaatcacaccgttcggggtggcgttcagcagacgaataaaggtatcgcgagatttcgcaatcagggcagctttatcgttcgctacagagtccagcaacaaggccagatttttctctttttctgccagctcgtttttcaggatctcctgataggtattcaccagagatttcaggacgtcgactttatcagctgcgacagcaatggtcgcaaaggcttcacgcgggatggcgttacgcagtgtgccgccgttgaaatcgataaggcgcagatccagttcttccgcatgacccgccaggaagcgcaccagcagtttgttggcattacccagcccaacgtggatttccccgccggagtgaccgcctttcagaccttttaaggttaacttgaaggtttcaaaaccagctggaaccgcttcacgatctaaatgcaggttggaggtgaagtcgataccccccgcacaacccatgtagatttcaccttcttcttcggagtcggtgttaatcagaatatcagcctgcaaccagttgccctgtaagccgaacgcaccgtccataccggcttcttcggtcatggtcagcagcacttccagcgggccgtgaaccacgttttcgtcagccagaaccgccagcgcagaggccataccaatgccgttatccgcacccagcgtggtgccgcgcgctttaacccattcgccatcaatataaggctggataggatctttcgtgaagtcatgcacggtgtcgttatttttctgcggcaccatatcgaggtgggcctgtaagacgaccggtttacgattttccatacctgcggtagcaggtttacgaatcaggatattacctacctgatcgcgttcgacatggaaacctttctcttttgcccaaccaacaatgtattcagcgagttgctcttcatgataggacgggtgaggaatagaacagattttggcaaaaatatcccacagcggctgtggagataattgagacagttcagacacgttaagtctccttgtcgatcacccgcaaaacagtattgcaggtcacagggttagcagaaaatgttgtcaacacaagacaggcttgcgagatatgtttgagaataccactttatcccgcgtcagggagaggcagtgcgtaaaaagacgcggactcatgtgaaatactggtttttagtgcgccagatctctataatctcgcgcaacctattttcccctcgaacactttttaagccgtagataaacaggctgggacacttcacatgagcgaaaaatacatcgtcacctgggacatgttgcagatccatgcacgtaaactcgcaagccgactgatgccttctgaacaatggaaaggcattattgccgtaagccgtggcggtctggtaccgggtgcgttactggcgcgtgaactgggtattcgtcatgtcgataccgtttgtatttccagctacgatcacgacaaccagcgcgagcttaaagtgctgaaacgcgcagaaggcgatggcgaaggcttcatcgttattgatgacctggtggataccggtggtactgcggttgcgattcgtgaaatgtatccaaaagcgcactttgtcaccatcttcgcaaaaccggctggtcgtccgctggttgatgactatgttgttgatatcccgcaagatacctggattgaacagccgtgggatatgggcgtcgtattcgtcccgccaatctccggtcgctaatcttttcaacgcctggcactgccgggcgttgttctttttaacttcaggcgggttacaatagtttccagtaagtattctggaggctgcatccatgacacaggcaaacctgagcgaaaccctgttcaaaccccgctttaaacatcctgaaaccagcacgctagtccgccgctttaatcacggcgcacaaccgcctgtgcagagcgcccttgatggtaaaaccatccctcactggtatcgcatgattaaccgtctgatgtggatctggcgcggcattgacccacgcgaaatcctcgacgtccaggcacgtattgtgatgagcgatgccgaacgtaccgacgatgatttatacgatacggtgattggctaccgtggcggcaactggatttatgagtgggccacccaggcgatggtgtggcaacaaaaagcctgtgcggaagacgatccgcaactcagtggtcgtcactggctgcatgcggctacgttgtacaacattgccgcctatcctcatctgaaaggagatgacctggccgagcaagcgcaggctttgagtaaccgcgcctatgaagaggccgctcagcgtctaccgggcacgatgcggcagatggagtttaccgtacccggcggtgcgcccatcaccggctttttgcatatgccgaaaggcgatggcccgttcccgacggtattaatgtgtggtggtctggatgcgatgcagacggactattacagcctgtatgaacgttattttgcgccgcgcggcattgcgatgctgactattgatatgccgagcgtgggcttttctagtaaatggaagctcacccaggactccagcctgttgcatcagcacgtcttaaaggcgctgcctaacgtaccgtgggtggatcacactcgcgtcgcggcctttggtttccgtttcggcgctaacgttgccgtgcgtctggcataccttgaaagcccgcgtctgaaagcggttgcctgtcttggtccggtagttcataccctgttgagtgattttaagtgccagcaacaggtgccggaaatgtatcttgacgttctggccagtcgtttggggatgcatgatgcttccgatgaagcgttgcgcgtggagctgaatcgctatagtttaaaagtgcaaggattgctgggacgtcgctgcccaacgccaatgttaagtggctactggaagaacgatccgttcagcccggaagaggacagtcgcttaatcaccagtagttctgctgacggtaaattattagagatcccatttaacccggtgtatcggaattttgacaaaggtcttcaggaaatcaccgactggatcgaaaaacgcttgtgttaaaaatttgctaaattttgccaatctggtaaaacagttgcatcacaacaggagatagcaatgacgttaccgagtggacacccgaagagcagattgatcaaaaaatttaccgcactaggcccgtatattcgtgaaggtaagtgcaaagataatcgattctttttcgattgtctggctgtatgcgtcaacgtgaaaccggcaccggaagtgcgtgaattctggggctggtggatggagctggaagcgcaggaatcccgttttacctacagttaccagtttggtctgttcgataaagcaggcgactggaagagtgttccggtaaaagacactgaagtggttgaacgactggagcacaccctgcgtgagtttcacgagaagctgcgtgaactgctgacgacgctgaatctgaagctggaaccggcggatgattttcgtgacgagccggtgaagttaacggcgtgagtgaaatgtgccggatgcatcacatccggcaatattcattaaaactgatacgtcatgccaaccgcgacaatatcatcattattaatattcaatttgttatcgctatccagttggttgattttataatcaacaaacgcactcatatttttgttgaaataatacgtagcaccgacgtcgatataattgaccagatcttcatcaccgataccttcaatatctttccctttgcttaagacataacccaggcttggacgcagaccaaagtcaaactggtattgagcgaccgcttcaaagttctgtgtcttattggcaaagccgccagttattggcgtcattttgcgtgtttcagaatagaaagttgccagataaatattattggcatcgtatttcagacctgttgcccatgcttctgcacgcttgcctgtgccacggctttgcaggttctgctcgttggtgcgatcactgttggtataggccccactaatggcgaaatcgctgccgccaaagtcatatgtcaaactcgtgccgaagccatcgccgttttgctttttaacgtcgcggttttcgtttttcccttgatattgcagggttaagttcaggccatcgataacgccgaagaagtcggtgttccgatacgtcgccagaccgctggcgcgtttggtcataaagttgtcggtctgcgcgctggaatcgccaccaaattccgggaacatatcggtccaggcttccacgtcatacaacgcccccaggttacgaccataatcgaaagaacccaaatctttatatttcaacccggcaaaagcgagacgcgttttttgctgtgcagtatcactctctgctttattaccggcaaactctgcttcccaacgaccataaccagtcagttgatcgttaatttgtgtttcgcctttgaaaccaaaacggatataactctggtcgccatctttactggcgttatcactcatataatgcatggctttaactttgccatagacatccagtttattaccgtctttattatatatttctgcagcctgtacagatgcagatgccacaatgcccatcaccactaatgccagagtgctctttttcattttcattcctgattttaattaacgcgcgaatattcagcgggagagtcccgttgaaaacaggaaagtttttaacctgagattgttaaagatatattacagattaataatattcttaaaatgtggtaatttattaaatctgtaataaaagcgtaaacaactgccgctaggcttgctgatcccgcgcaacaaaacgccatgctttgctcgcagatggttggcaaccgacgacagtcctgctaaaacgttcgtttgatatcatttttcctaaaattgaatggcagagaatcatgagtgacagccagacgctggtggtaaaactcggcaccagtgtgctaacaggcggaagccgccgtctgaaccgtgcccatatcgttgaacttgttcgccagtgcgcgcagttacatgccgccgggcatcggattgttattgtgacgagcggcgcgatcgccgccggacgtgagcacctgggttacccggaactgccagcgaccatcgccagcaaacaactgctggcggcggtagggcagagtcgactgattcaactgtgggaacagctgtttagcatttatggcattcacgtcgggcaaatgctgctgacccgtgctgatatggaagaccgtgaacgcttcctgaacgcccgcgacaccctgcgagcgttgctcgataacaatatcgttccggtaatcaatgagaacgatgctgtcgctacggcagagattaaggtcggcgataacgataacctttctgcgctggcggcgattcttgcgggtgccgataaactgttgctgctgaccgatcaaaaaggtttgtataccgctgacccgcgcagcaatccgcaggcagaactgattaaagatgtttacggcattgatgacgcactgcgcgcgattgccggtgacagcgttagtggcctcggaactggcggcatgagtaccaaattgcaggccgctgacgtggcttgccgtgcgggtatcgacaccattattgccgcgggcagcaagccgggcgttattggtgatgtgatggaaggcatttccgtcggtacgctgttccatgcccaggcgactccgcttgaaaaccgtaaacgctggattttcggtgcgccgccggcgggtgaaatcacggtagatgaaggggcaactgccgccattctggaacgcggcagctccctgttgccgaaaggcattaaaagcgtgactggcaatttcagccgtggtgaagtcatccgcatttgcaacctcgaaggccgcgatatcgcccacggcgtcagtcgttacaacagcgatgcattacgccgtattgccggacaccacagccaagaaattgatgcaatactgggatatgaatacggcccggttgccgttcaccgtgatgacatgattacccgttaaggagcaggctgatgctggaacaaatgggcattgccgcgaagcaagccagctataaattagcgcaactctccagccgcgaaaaaaatcgcgtgctggaaaaaatcgccgatgaactggaagcacaaagcgaaatcatcctcaacgctaacgcccaggatgttgctgacgcgcgagccaatggccttagcgaagcgatgcttgaccgtctggcactgacgcccgcacggctgaaaggcattgccgacgatgtacgtcaggtgtgcaacctcgccgatccggtggggcaggtaatcgatggcggcgtactggacagcggcctgcgtcttgagcgtcgtcgcgtaccgctgggggttattggcgtgatttatgaagcgcgcccgaacgtgacggttgatgtcgctagcctgtgcctgaaaaccggtaatgcggtgatcctgcgcggtggcaaagaaacgtgtcgcactaacgctgcaacggtggcggtgattcaggacgccctgaaatcctgcggcttaccggcgggtgccgtgcaggcgattgataatcctgaccgtgcgctggtcagtgaaatgctgcgtatggataaatacatcgacatgctgatcccgcgtggtggcgctggtttgcataaactgtgccgtgaacagagcacaatcccggtgatcacaggtggtataggcgtatgccatatttacgttgatgaaagtgtagagatcgctgaagcattaaaagtgatcgtcaacgcgaaaactcagcgtccgagcacatgtaatacggttgaaacgttgctggtgaataaaaacatcgccgatagcttcctgcccgcattaagcaaacaaatggcggaaagcggcgtgacattacacgcagatgcagctgcactggcgcagttgcaggcaggccctgcgaaggtggttgctgttaaagccgaagagtatgacgatgagtttctgagtttagatttgaacgtcaaaatcgtcagcgatcttgacgatgccatcgcccatattcgtgaacacggcacacaacactccgatgcgatcctgacccgcgatatgcgcaacgcccagcgttttgttaacgaagtggatagctccgctgtttacgttaacgcctctacgcgttttaccgacggcggccagtttggtctgggtgcggaagtggcggtaagcacacaaaaactccacgcgcgtggcccaatggggctggaagcactgaccacttacaagtggatcggcattggtgattacaccattcgtgcgtaaataaaaccgggtgatgcaaaagtagccatttgattcacaaggccattgacgcatcgcccggttagttttaaccttgtccaccgtgattcacgttcgtgaacatgtcctttcagggccgatatagctcagttggtagagcagcgcattcgtaatgcgaaggtcgtaggttcgactcctattatcggcaccattaaaatcaaattgttacgtaagatcttatcattctcccaccaaaaaattatcttaatgtaacagctggtgtaagtaaattctatcaacgaagatcaatcttatctactgaccaaaaaggcctgatagggcttcgctcactatacatccttggctgcaggtttagttgtacaccactcctaaatttaatgtgttggcaatgtgttcaataaagctcgaacaaattagctcattatgatcggttaatacttcaacttctggttgcatgattgtttgtccgtaaaaagataacgcgcctgccgggtagtagcaggcgcattacgcaataggtaaacaagggaggaagttcagaaatgtaaatcgggaaggttgtacgcaatgttcatcgtactacgttgttacggctttgccgcaacaagccagttgcctgccgcgctcgcagaatgtctgcagcccggagataaggagattgttcctgccagctaaatcccttcctgtcgatacgaaccagctcgtatttttctaccagaaaattcacggcatcggctagggtgataccggcatcgatagtctgtatcaggaatgttcgggttaaatatcagcaaaaagcccgcatcatgaatactggatatgaagcatgagagttacctcagtgtttatataaggattcggtccccctctctggaacggtaactctcaatctgatcggttcctgcgttagttcacatcacgactcattttttcgctctcaccggcatcccatttgccacaaaatatcccgccgtgctcctcggcagcgcttcctgtccacgaatcatatccgctattttctcgccaatcataattgtcgtggcgttcaaattcccggtgataatctgcggcataatgctcgcatccaccacacgcaggccttctaacccgtgtacgcggccttcgccgtcaaccacggacatctcgtcgtaacccattttgcaggtaccgcacggatggaaggcggtttcggcgtggttacgcacgaactcatcgagctgttcatccgtctggcattcgacaccggggctgatttcgcggccacgatactgatccagcgcgggttgatgcatgatctcgcgggtgatgcgaattgcgtcgcggaactcctgccagtcctgctcgtggctcatgtagttaaacagaatcgccggatgctggtgcgggtcgcgggatttaatccgcacatgcccacggcttgggctgcgcatactgccgacgtggcactggaaaccgtgctctttcactgcattgctgccgttatagttaatcgctactggcaggaaatggtactgaatattcggccacgcaaattcctcacggctgcgaataaatccacctgcttcaaagtggttgctggcaccaacgccagtgccgccaaacagccactccgcaccgattttcggctggttccaccactgcagggcagggtagagggaaaccggttctttgcactcatattgcagatacatctccagatgatcctgaagattttcgccgacgccgggtaattcatgcaccagcggaatatcaaactccgccagcagttcagcgttgccgacgccggagcgttgcaggatctgcggactggcaatcgcgcctgcacataacagcacttctttgttggccgttgcgcgggttgggatggtgctgtcgccttccagccattcgacgcccaccgcgcgtttgccgtcaaaaatgatgtgatcggtcatagcgtgagtacgaatggtcaggttaggacggcttttggcctgatcgagatagccacgcgcggtgctggcgcgacggccctgcggcgtgacggtgcgatccatcggaccaaaaccttcctgctgataaccgttgagatcgtccgtgcgcgggtagcccgcctgcacgcccgcttcaatcatcgcttcaaacagcggattgacgccgggtttggaggtagtgacgctcaccgggccatcaccgccgtgatagtcgttttcacccatatcgcgagtctcggccttgcggtagtagggcaggcagtcgaggtagctccagttctccagaccgggttcttgcgcccagttatcgagatccagcgcattgccacggatgtagcacatgccgttgatcaggctgcttccacccagacctttaccgcgtccgcactccatgcggcggttattcataaacggttcaggttccgtttcataggcccagttgtagcgtttaccctgtagcgggaatgccagggcagcgggcatctgggtgcggaagtcaaagcgatagtccgggccgcccgcttcaagcagcagcacggaggtattcggatcttcagtcagacgggtagcgagaacgttgccggcactgccggcaccaataatgatgtagtcaaattgcaaataaacctcctggttagaatatggactggaatttagccatctcaacctggatggacttcacctgggtgtaactctggagcgtcatcacgccgttctcgcgaccaatgccggagtgtttgtagccgccaacgggcatctctgccggggattcgccccaggtgttgatccagcaaatacccgcttccagctgatgaatgacgcgatgcgcgcggttcaggtccgctgtcacgatgcccgccgccaggccgtagtcggtatcgttagcgcggcgaatgacttcgtcttcgctctcgtaggtcagaatggacatcactggcccgaagatctcttcacgcacgatggtcatatcgtcgctgcaatcggtgaacactgtcggtgcaacccatgcgccgttatcgaagccatcgcctttcagtacatcgccgccgcacagtacgcgcgcgccttcctctttgcctttggcgatatagcgcagcacgttatcgcgatgcgggaagctgaccagcgggccgaagttagtttgcggatcgaaaacgtcgcccgcgcgaatgcgctcaacgcgcgccagaattttctgctcaaatgcggctttgcatttcgccggaacgaagacgcgggtgccattggtacacacctgaccggagctgaagaagtttgccatcatggcgatatcggcggcgagatcgagatccgcatcatcgaaaacgatcagcggacttttaccgcccagttccatggtcacttctttcagggaagaggccgcgctgttagccatcacttttttgccgctggcgacaccgccggtaaaactcactttggcaatgcccggatgctcggtcagatattgcccggtctccgcgcccacgcccggcaacacgttaaatacgccgtccggcaggcccgcttcgctgtaaatttcagccagctttaacgcggtaagcggggtaacttcgctcggtttgaaaatcattgcgttgcctgccgccagcgccggggcggatttccacagggcaatctggatcgggtagttccatgcgccaatccctgccactacgcccagcggttcgcggcgggtatacacaaaggacgtttcacgcaacgggatctggctgccttccagcgccgggatcagcccggcgtagtactccagcacgtccgcaccggtaacgatatcgacggtactggtttcgctatatgcttttccggtgtcgagggtttccagttttgcgagttcgtcattgcgttcacgcagaatatcaacggcccgacgcagaatacggctgcgctccatggcggtcatgctcgcccagattttttgcccctgctgggcgcttttcacggcgcgatcgacatcctcgcgcccggcggcctgcacggtcgccagcacgttaccgttggccgggttaatggtctcgaaggtgcgaccgctggtggcggaggtataaccaccatgtatataaagctgctgttctgccattcgggacatcacgtctcctcggttaatcggtgggtagatgctgagtgataaagtggcgggtcagggaattagcgcgggttttatccagcggtttgccgctcagagccgcgcgcagccataatccatcaatcagcgcggccaggccgtagcccgcttcctgtgcctgttcgcgcggcaattcgcgacgaaactcgctcaccagattgctcagcaagcggcggctgctgacctgctgtaaacgatagagcatcggctgatgcatactgctggcccagaacgccagccaggctttcatcgccgcactgctcacctgcgtttcatcgaagtttccgccaacaatcgcctgtaatcgctgctctgcactgccctgcggaagtgcatgtaatcgattcaaaaccgcgtcacgcagctgactggtgatatcgcgcatggttgcttccagcagaccatttttgtccctgaaatagtggctgatgatccccgtagaaacgcctgcacggcgggcgatctgcgcgatcgttgcatcgtgcatgcccacttcatttattgcttccagtgtggcgtcgatcagttgtctgcgccggatgctctgcatccccaatttgggcattttcgccactccattcatcagcggtgtttatctattaaagcggttattgattggacgttcaatataaaatgtgtcttaattgttacgaatttgattttaaatagtaacaataacagtggggatactggatgacagaccttagtcacagcagggaaaaggacaaaatcaatccggtggtgttttacacctccgccggactgattttgttgttttccctgacaacgatcctgtttcgcgacttcagcgccctgtggattggccgcacgctggactgggtttctaaaaccttcggttggtactatctgctggcggcaacgctctatattgtctttgtggtctgtatcgcttgtagccgttttggtagcgtgaagctcgggccagaacaatccaaaccggaattcagcctgctgagttgggcggcgatgctgtttgctgccgggatcggtatcgacctgatgttcttctccgtagccgaaccggtaacgcagtatatgcagccgccggaaggcgcgggacagacgattgaggccgcgcgtcaggcgatggtctggacgctgtttcactacggcttaaccggctggagcatgtatgcgctgatgggcatggcgctcggatactttagctatcgttataatttgccgctcaccatccgcagcgcgctgtacccgatcttcggtaaacggattaacgggccgataggtcacagtgtggatattgcagcggtgatcggcactatcttcggtattgccactacgctcggtatcggtgtggtgcagcttaactatggcttgagcgtactgtttgatattcccgatagcatggcggcgaaagcggcactgatcgccttgagcgtgataatcgccacgatctctgtcacctccggtgtcgataagggcattcgcgtgttaagcgagcttaatgtcgcgctggcgctgggattgatcctgttcgtattgtttatgggcgacactagcttcctgcttaatgcactggtgctgaatgttggcgactatgtgaatcgctttatgggcatgacgctcaacagttttgccttcgaccgtccggttgagtggatgaataactggacgctcttcttctgggcatggtgggtggcatggagcccgtttgtcggcttgttcctggcgcgtatcagccgtgggcgtaccattcgccagttcgtgctgggcacgttgattattccgtttaccttcacgctgttatggctcagcgtgttcggcaatagcgcgctgtatgaaatcatccacggcggcgcggcatttgccgaggaagcgatggtccatccggagcgcggcttctacagcctgctggcgcagtatccggcgtttacctttagcgcctccgtcgccaccattactggcctgctgttttatgtgaccagcgcggactccggggcgctggtgctggggaatttcaccagccagcttaaagatatcaacagcgacgcccccggctggctgcgcgtcttctggagcgtggcgattggcctgctgacgctcggcatgctgatgactaacgggatatccgcgctgcaaaacaccacggtgattatggggctgccgttcagctttgtgatcttcttcgtgatggcggggttgtataaatctctgaaggtagaagattaccgccgtgaaagtgccaaccgcgataccgcaccgcgaccgctggggcttcaggatcgcctgagctggaaaaaacgtctcagccgcctgatgaattatccgggcacgcgttacactaaacagatgatggagacggtctgttacccggcaatggaagaagtggcgcaggagttgcggttgcgcggcgcgtacgtggagctaaaaagcctgccaccggaagagggacagcagttgggtcatctggatttgttggtgcatatgggcgaagagcaaaactttgtctatcagatttggccgcagcaatatagcgtgccgggctttacctaccgcgcacgcagcggtaaaagcacctactaccggctggaaaccttcctgttagaaggcagccagggcaacgacctgatggactacagcaaagagcaggtgatcaccgatattcttgaccagtacgagcggcaccttaactttattcatctccatcgtgaagcgccgggccatagcgtgatgttcccggacgcgtgattgttattgcataaaaccgcgccatgtctgcatatggcgctgtttctcctacctcttgatacgttatatctatacggttaagcccttagtatctattgatgattaccagacaacagataataaaaaagaaaagaactattgcagcccaaaacctacatttgggctgttgcgaatgttcaataagtttagtcttatttaatgtaaatattgctgatcatttgaaatgacgcattattcatgagaaatgtgtatcgtaaatcaactgaaattaacgcaaccatttgttatttaaggtttaattatctgtgtgtgatattttattgaatgttttaaatattgtttttattggcattgctataatattggttatcatttgctgaatggattcagtcttaatgagtgggtttttaagggacaggcatagagtaatgatacgtatgcataaccaacatctttactcattatgtcattgaatgttgacgctatgtgtttatgagggagaggtattttcagttgatctggattgttaaattcatataatgcgcctttgctcatgaatggatgccagtatgtagtgggaaattataaatattgaaatagtccaactacttctttattaccaaaaatgagtatctgaattttaatattgcattcttgcgtgattatctcctgagtttgacttgtgattacctttttaaggtatttagcgtaactgtttttgagcgagcatcagaggtaaagataatcttcttgatagtgatgtgggatgttatacgtatggcatcgctgatgtttatggttaccccttatgtgtgctcaggaatcgacaggtaatcactcatactgaacagcgataaaagataaaggtgtgttcatgaatagttgtgattttcgtgtttttctgcaagagttcggtacaacggttcatttgagtttgcctggtagcgtatccgagaaagaacgactgctactcaagctgctgatgcagggaatgtctgtaacagaaataagtcagtacagaaatcgcagtgcaaagacaattagtcatcaaaagaaacagctctttgagaaactggggattcagagcgatattactttctggcgcgatattttctttcagtacaatccggagatcatatccgccacggggagtaatagtcacagatatattaatgataatcactatcaccatatcgtcacgcctgaagccatcagtctggcgttggaaaaccacgaattcaaaccgtggatccaaccggttttctgcgcgcagactggcgtactgacgggctgtgaggtgcttgtccgctgggaacatccacaaacgggaattatcccaccggatcagtttattcctctggcggagagttccggtcttattgtcataatgacccgccaactgatgaaacagactgcggatattctgatgccggtaaaacatttgctgccggacaatttccatattggcatcaacgtcagcgcgggttgttttttggcagcgggatttgaaaaagagtgtctgaacctggttaataaattaggtaacgataaaatcaagctggttctcgagctaacggaacgtaaccctattccggtaacgccagaagccagagcgatatttgacagccttcatcagcacaacattacctttgcgctggatgactttggtacgggttatgcgacctatcgttacttgcaggcgttcccggtcgattttattaagatcgataagagttttgtgcaaatggcgagtgtcgacgaaatctccggtcatattgtggacaatattgtcgaactagcgcgtaagcctggtctgagtatcgtggcggaaggggtagaaacccaggagcaggcggatttaatgatcggtaaaggcgttcactttttgcagggctatttgtactctccgccagtaccgggtaataaatttatctctgaatgggtaatgaaagcaggtggttgatgtaaaccgctattcacagcgcatcgggaggttggcagcgattaattctcccgatgcagtaaatcctgatagatccccgttaatatgccatttggcgcaaattgttttttaatccactgcgtcacctgacccgtagcagaatgctgagtcgccagtaacatgcggctatcctggcgcggattatggatttgtcgggtaaccagcagggattgcgtcatcgcctcacggaccatgtaatccggcaaaaaaccaattccttcacctaaaatctggcactgacatttggtgttgaaatctggcaccagaatactctcctgcccgtgcagcaaccagcccacttttttattaatcgtatgcgcggtgtcctccaccataatattagggtagagacgcagttggctttcggcgatgggttccggcacaaaggctaacgggtgatccggggcgatagcaaaagcccagcgaatcgcgccaatttcagtgtaatcaataccgccgccgtccagtagtgtatcgggtgcgccgatggcgatattggcctgattattaataatcgcatcccagacgccgttatacacttcggtggtgacggtaatctggcaggtaggaaactgctttttcagcacctgtaacaagcgtgcggtgtgtttgggcgtataaagcagctgattaatacaaatgcgcacacgcgcttctatgccctggctaatagtatcgattctgcgtttgatggcataaaaatcattcagcaggtcggtagctttgcggaaaaaataacgcccggactccgttaactcaatgctgcgggtactgcgagtgaacagcaccacatccagccccgtctccatacgcttaatggtgtagctaatggcggaagtggttaaacccaactcttctgcggctttactgaagctgccaaaacgcgcagcggtagtaaatgccaacagattctcttcggtaaaaatactgttcattaaaccattctcgccattatctactatgaatttctccagctatgactgtagaggtatcggttaaagatagataatcatttttgaataacttttaatacccgtcgcgtttagtcgtcgcttcgcttaatttttgtccaccatattcactaattacccccacgcagttacccgccagaaaacccagtaacgtcaccgtccagttcatcccgctggcaaaaaacagcgtcatgccgagaaagccaccgggaataaaggacagtaaccagaaacgcccttgccagaccactaccgcgctgaagggtacggtagtaattacgctcgcccagaacgcggacagtccacttacagaggccagccaaccagcagtcagcgcggcgaaaaacgcccacaccatcccggaataattaaccgccagacttctgataaacccgcttttaccgccgcctgcggcataaaaactgcaaaaggcgacgaagccaatggttcctaataattcccatccttgagagagcccgacatgactagacactaactgccaaagccctgcacaaataccgacggtgacacccgttgccgtgagtccgttcatcttgttcccctctggttagacatggacgaaagctactcttacatgtgcagactatagagaaataaaacctgattgagtgaaagggtatcgggtcaaagaaacaaatattgcactaccgcacactgcgaaaagattgttgaatattattcaacaaaaaggcgagatacggcgaattaaatttaagcgggttcttttatcagattatcgttgctattctcaattcatcgaaaacagccacaaaaaccaggggaatgtgaatgagtataaaaaatctacctgccgactatttattggctgcacaacagggtgatatcgataaagtaaaaacctgccttgcgctgggtgtcgatattaatacctgcgatcgtcaggggaaaacggcaattacgctggcaagtttatatcagcaatatgcttgcgttcaggcattaattgatgccggagcggatattaataagcaagattatacctgtttaaatccttttttaattagctgtctgaacgatgatttaacgctactacgaattattttaccggctaaacccgatcttaattgcgtaacccgttttggcggtgtcggcctgacgcctgcctgtgaaaaaggccatttaagtattgtaaaagagcttttggcgcatacggagattaacgttaaccagaccaaccatgtaggctggacgccgctactggaagcgattgtgcttaatgatggtggtattaaacagcaggcgattgtgcagttattgctggaacacggtgccagcccgcatctgaccgataaatatggcaaaacgccactggaactggcgcgggaacggggctttgaagagattgcgcagttactgattgccgcaggtgcataaaccgggaggcttgctatcaacacaccagaaagacggtgtgtgtgggcgctaactgcggatgcggattttctggcgcagcgggggcaaggacaggttgaacaggtctttgccagagcggtaaatatcgcactcccggctcgccagcagttgctgacgctgctttgtgaagagtacgacaatgcgccaaacagttgtcggttggcactcactcactttgatgatctgttccggcatggtgataaggttcagtttgacgatcaaggtattacggttggtcaacatcttcatatagagatgagtcgttgtcggcgttggctgtccccaaccttgcaaatgaccgctgtgaattttcaccttatcgcctggctacagtggcacgacattattcatcagcacctgggggaaaatgaaaccctgtttaattatcgcggcgataatccgttttatcaggcgttaaataaagaattacatattaaacgacgggcagttattcaggccgtaaacgataaacaaaatatcgccagtgcggtcgccagtatgatggggttagggattggccttacgccaagtgccgacgattatttaacaggtctggcgcttattttatttattcccgggcatccggcggaaaaatacaaagaggaattttatctcggtctgcaacgcggcaaaaataataccacattattaagtgccataacgctggaagccgcattacaacaacgctgccgggaaaatattcatcgttttattcacaacattatttatgacatccctgggaacgcaactcaggcaatagaaaaaattaaacatattggctccagttccggctgcgacatgctgtatggcatggccgatggttgtgcgctgagccaaacctacggagggaattatgtcagttaattaaccaaacctacggagggaattatgagtgttaaaatagtcattaaaccgaatacctattttgattctgtcagcctgatgtctatctccacgcgtgcaaataaactcgacggcgtcgagcaggcatttgtggcgatggcgaccgaaatgaataaaggcgtgctgaagaatttaggactgctgacgccggagctggagcaggcgaaaaacggcgacctgatgattgtcatcaatggtaaaagcggtgcggacaacgagcagttactggtggagattgaagaactgttcaacaccaaagcgcaaagcggcagccacgaggcgcgttacgccactattggcagcgccaaaaagcatatcccggaaagtaacctggcggtgattagcgtcaacggtctgtttgccgctcgcgaagcgcgtcaggcgctgcaaaacgatctcaacgtgatgctgttttccgataacgtcagtgttgaagatgaactggcgctcaagcaactggcccacgaaaaagggctgctgatgatggggccagactgtggcacggcgattatcaacggcgcggcgctctgttttggtaacgccgtgcgtcgcggcaacatcggtattgttggcgcatccggcaccggcagtcaggagttgagcgtccgcattcatgaatttggcggcggcgttagccaactgattggcaccggcgggcgcgacctgagcgagaaaatcggcggcctgatgatgctcgacgccatcgggatgctggaaaacgatccgcaaactgaaatcattgcgcttatctccaaaccgcctgcgcctgcggtggcccgcaaagtgctggaacgtgcgcgcgcctgccgcaagccggtggtcgtctgcttcctcgatcgtggcgaaacgccagtggatgagcaggggctacagtttgcccgcggcaccaaagaggcagcgctaaaagcggtgatgctctccggcgtgaaacaggaaaatctcgacctgcatacgcttaaccagccgttgattgcggatgtgcgtgcgcgtctgcaaccgcagcagaaatacattcgtggcctgttctgcggcggcacgctgtgcgacgaaaccatgttcgcggtgatggaaaaacatggcgatgtctacagcaacattcagcccgatccggaattccgcctgaaagatatcaaccgcagcatcaaacacaccttcctcgactttggcgatgacgacttcaccaatggcaagccgcacccgatgattgaccccaccaaccgcatcagtcgcttgatcgaagaggcgcgcgatccagaagtggcggtgatcgtgatggattttgtgctcggatttggaagccatgaagatccggtcggctccaccatcgagacgatcaaagaagcgaaagcgatcgccgctgccgaaggacgcgagttgatcattctcgcctatgtgctgggtaccgatcttgatacgccaagcttagaacaacaaagccagatgctgcttgatgccggagtgattctggcgagcagcagcaccaataccggattgctggcgcgtgaatttatctgcaaaggggaggaagcctgatgagccagagtctgtttagccaaccattgaacgttattaacgtcggcatcgccatgtttagcgatgacctgaaaaagcagcatgtagaagtgactcaactcgactggacgccgccggggcagggcaatatgcaggtggtgcaggcgctggataacattgccgatagcccgctggcggacaaaatcgccgccgctaaccagcaggcgctggagcgtattatccagagccatccggtgctgattggttttgatcaggcgattaacgtggtgccgggcatgacggcgaaaaccattcttcacgccgggccgccgatcacctgggaaaaaatgtgcggcgcgatgaaaggcgcggtcaccggagcgctggtgttcgaaggactggcgaaagatctcgacgaggcggctgaactggcggcttccggggagatcaccttcagcccgtgtcacgagcacgactgcgtgggaagcatggcgggtgttaccagcgccagcatgtttatgcacatcgtaaaaaacaaaacctacggcaacatcgcttataccaacatgagcgagcagatggcgaagattttgcgtatgggcgctaacgaccagagcgtgattgaccgcctgaactggatgcgtgatgtgcagggaccaatactgcgcgacgcgatgaaaattatcggcgaaatcgatctgcgcttaatgctggcgcaggcgctgcatatgggcgatgagtgccataaccgcaataacgccgggacgacactgctgattcaggcgctgacgccggggattattcaggcgggttattccgtcgagcaacagcgcgaagtgtttgagtttgtcgccagcagcgactacttctccggcccgacgtggatggcgatgtgtaaagcggcgatggatgcggcgcatggcatcgaatacagcaccgtggtcaccaccatggcgcgtaacggcgtcgagttcggcctgcgggtcagcggcctgccggggcaatggtttaccggcccggcgcagcaggtgatcggcccgatgtttgccggttataagccggaagatagcgggctggatatcggcgacagcgccatcaccgaaacctacggtattggcggatttgctatggcgaccgcgcccgctatcgtcgcgctggtgggcggcacggtggaagaagctattgatttctcccgtcagatgcgcgaaatcaccctcggtgaaaaccccaacgtcaccattccgctgctcggttttatgggcgtgccgagcgcaatcgacatcacccgcgtgggtagcagcggcattctgccggtgatcaacaccgccatcgcccataaagatgcgggcgtcggcatgattggcgcgggcattgtgcatccaccttttgcctgcttcgagaaagccattcttggctggtgcgaacgttacggcgtctgacctacatgttcatgccggatgcggcgtgaacgccttatccggcctacgaatggcgcaagaatctgtaggcctgataagcgtagcgcatcaggcatttgtcaccattgccggatgcggcgtgaacgccttatccggcctacgaatggcgcaagaatctgtaggcctgataagcgtagcgcatcaggcatttgccaccactgccggatgcggcgtggacgccttatccggcctacgagtggcgcgagaatctgtaggcctgataagcgtagcgcatcaggcatttgtcaccattgccggatgcggcgtgaacgccttatccggcctacgagtggcgcgagaattgtaagcctgataagcgtagcgcatcaggcagtctggcgttggtcataaccccatcaccctctgtagcggacataacaacatgaaagagcttgtggtcgttgccattggtggcaacagcattatcaaagataacgccagccagagcattgagcatcaggcggaggcggtgaaagccgtcgccgatacggtgctggaaatgctggcttccgattacgacattgtgctgacccacggcaacgggccgcaggtcgggctggatttacgccgtgcggagattgcccacaagcgcgaagggctgcccttaacgccgctggcgaactgtgtggcagatacgcagggcggcatcggctatctgatccaacaggcgctgaataaccggctggcgcgtcacggcgagaagaaagccgtcaccgtggtgactcaggtggaagtggataaaaacgatccaggttttgcccatcccaccaagcccatcggcgcattctttagtgacagccagcgtgacgaattacaaaaggcaaaccctgactggtgttttgttgaagatgccgggcggggctatcgccgcgtggtcgccagcccggaaccgaaacgtattgtcgaagcacctgccattaaagcgctgatccaacaaggttttgtcgtaattggcgcgggcggcggtggaattccggtagtgcgtactgacgcgggagattaccaaagcgtggacgcggttatcgacaaagatctctctaccgcgctgctggcccgtgaaattcacgccgacattcttgtgatcaccactggcgtcgaaaaagtgtgtattcactttggcaaaccgcagcagcaggcgctcgatcgggtggatattgccaccatgacccgctatatgcaggaagggcatttcccgcccggcagcatgttgccaaaaatcatcgccagcctgacatttttagaacaaggcggcaaagaagtgattatcaccacgccggaatgcctgcctgcggcgctgcgcggcgaaacgggcactcatattattaaaacgtaaggacgtaagatgaaagaaagcaatagccgccgtgaatttctgagccagagcggtaagatggtcaccgccgccgcgctgtttggtacctctgtgccgctcgcccatgcggcggtagctggcaccctaaactgcgaagcgaacaacaccatgaaaatcactgacccgcattactatctcgataacgtgctgctggaaaccggttttgactacgaaaatggcgtggcggtgcagacccgcacggcgcgccagaccgtggagattcaggacggcaaaattgtcgccctgcgcgagaacaagctgcatccggacgccacgctgccgcactatgacgctggcggtaagctgatgctgcccaccacccgcgacatgcatattcatctcgacaaaaccttttacggcgggccgtggcgcagcctcaatcgtccggcaggcaccaccatccaggacatgatcaaactcgagcagaaaatgctgccggaactgcaaccgtacactcaggagcgggcagaaaaactgattgatttattgcagagcaaaggcaccaccattgcccgcagccactgcaatatcgaaccggtttccggcctgaaaaatctgcaaaatttgcaggcggtgctggcgcgacgtcaggcgggctttgagtgtgaaatcgtcgccttcccgcagcacggtttgctgctgagcaaatctgaacctttaatgcgtgaagcgatgcaggcgggggcgcattacgtcggcggcctggacccgaccagtgttgatggcgcgatggaaaaatccctcgacaccatgttccagattgcgctggactacgacaaaggcgtcgatattcacctgcacgaaaccactccggcaggcgtggcagccatcaattatatggttgaaacggtagagaaaacgccacagctgaagggcaagctgaccatcagtcacgcctttgcgctggcaacgctcaacgagcaacaggtagatgaactggcgaaccggatggtggtgcaacaaatttctatcgccagcacggtgccgattggcacgctgcatatgccgctcaaacagttgcacgacaaaggcgtaaaagtgatgactggcactgacagcgttatcgaccactggagcccttatggtctgggcgacatgctggaaaaagccaatctgtacgcgcagctctatattcgtcctaacgaacagaacctctcccgcagcctgtttttagccactggcgatgtattgccgctgaatgaaaaaggcgagcgtgtatggccaaaagcgcaggatgacgccagctttgtgctggtggacgcctcctgttccgccgaggcggtggcgcgtatcagcccgagaaccgcaacgttccataaagggcaactggtgtgggggagtgtggcaggttgatgcgcatttgaaacgcctgcaacggtgaatagtaagagatttaagccccagggagtggggcaatctgaatatgagtgtgtcggcagaaatggacattatctttgaggaatatgcccttattgacgttgtgtagataactatttgtctacgtgaaaagatcatcagttttgccgattttagtcttttacagatagcaaatatcacacttacaggcgctcgccttatggggaacgttgctgctctgtttcattcaggctcgcggcatgttggggctggatcgggtggtttaaatattggctatattcaatggacgcgttttgccgcgatgacatatcaggcgttgccaaatacacatagctaatcaggagtaaacacaatgaagatcaaagctgttggtgcatattccgctaaacaaccacttgaaccgatggatatcacccggcgtgaaccgggaccgaatgatgtcaaaatcgaaatcgcttactgtggcgtttgccattccgatctccaccaggtccgttccgagtgggcggggacggtttacccctgcgtgccgggtcatgaaattgtggggcgtgtggtagccgttggtgatcaggtagaaaaatatgcgccgggcgatctggtcggtgtcggctgcattgtcgacagttgtaaacattgcgaagagtgtgaagacgggttggaaaactactgtgatcacatgaccggcacctataacagcccgacgccggacgaaccgggccatactctgggcggctacagtcaacagatcgtcgttcatgagcgatatgttctgcgtattcgtcacccgcaagagcagctggcggcggtggctcctttgttgtgtgcagggatcaccacgtatagcccgctacgtcactggcaggccgggccgggtaaaaaagtgggcgtggtcggcatcggcggtctgggacatatggggattaagctggcccacgcgatgggggcacatgtggtggcatttaccacttctgaggcaaaacgcgaagcggcaaaagccctgggggccgatgaagttgttaacagtcgcaatgccgatgagatggcggctcatctgaagagtttcgatttcattttgaatacagtagctgcgccacataatctcgacgattttaccaccttgctgaagcgtgatggcaccatgacgctggttggtgcgcctgcgacaccgcataaaagcccggaagttttcaacctgatcatgaaacgccgtgcgatagccggttctatgattggcggcattccagaaactcaggagatgctcgatttttgcgccgaacatggcatcgtggctgatatagagatgattcgggccgatcaaattaatgaagcctatgagcgaatgctgcgcggtgatgtgaaatatcgttttgttatcgataatcgcacactaacagactgaaaaaattaataaataccctgtggtttaacatattaacttcgctctccacttaactttttagttaaggagagcgaaataatatcaaagtagcagtaaaacctataacgtaaatttaaattgttaaattaacgccctccagtacacaatacttcacacgttagttatgagcgatttctgatagtgcctggtttaatcagagctttattatctgcgacgtttatttttatttaagagagatcgcgatgataagtttaaaagctccgcacaataatttgatgccatatacgcaacaaagcatacttaatacggttaaaaacaatcagttaccagaggatatcaaaagctccctggtttcctgtgtcgatatattcaaggttttgattaaacaatattatgattatccttatgattgtcgtgatgatttagtcgatgacgacaaactcattcatctcatggctgccgtacgagactgtgagtggagtgacgataacgcactcaccataaatgtgcagtttaatgatttccctggattttatgactggatggattaccctgatcacccggttaagtttgtttttcacatacttgaaaatcaaaaagggacagtttgggtatatgaccaggatgatgcgtttcttgatattaaagcaaacgtgcaggctggacgctttaccgggcttaagaaattagtgcagtttatcgatagtgtgcgaacagattgcaaatgtattcttcttgaataccatatgcctttgctgagaattttccctaaagggaaagagtgtatgcatgtggaaaaatggcttcgcgaaatgagctctattccggagacagacgcgcccattaagcaggcgcttgcgcatggattattattacacttaaaaaatatctaccctgtttttcctgaaagtctggtgatgttattgctctctgttctggacgtaaaaacatacagagatgatgcgcgattaaatgaatggatatctaatagagtgcaggaattaggtgacagatattatcctgtaaataagcacgttaaaatccgctacactctttaattcagaaagggttccacctgcaagttgttattccacctgagagtgaatcgcaatgcaggtaatcatttcatctgtatatctgtatgccaactggcattccatctcttttttcgccgatattttgttgtgatcggcgacacttcgcttaaaaaagcaccagtagtggtttcgcagccatgcggtgtataaaaaatgatctcatgcagatgttttgtgaatgtgttggttgacattcatatgaaaaaaatcataattccatcatgtttgtgtggggtcttttctgtatcttacgcatcgcactcaagcctgacagaaaatatgctgtaaggctcatatcaaaaaccgccattagctcatcaggaagagcagacgacaaccaggattgttgtatggtacggggttcgaggcctcgatggcggtccaacttttcaaaactcttctgaatcagatccccttattaagttccctgcaaagtggaacattgccattgtttggctatagtggatggggcagaccaatgaaaaaagcccacacaggggagagtgggctgaaatgggaagctaaagacagtagtaaacttatcggaaataaggaccacgcattacgggggctaagtagcccgatggccgtgattcggcaaatcaggttgattacgtaaagagtaaattatctgctcaccgctgcgtcaccccttcgtaaatcaggcgtagcgcgaatacaccaataattgcaccaataacccgactggcaacgcgttgcatacgcccataagcacgacgcacagcgggcaaagaaaacgcctgactaagaaaaactcgccagataatacttgcgagcacaatccccgcccaggccattaaacgtgcccatgttggtgtttctgcatttaatgttacactgaaaatactgataaaaaataaaacggtttgcgggttagagagatcggtaattaatccgcggcgaaaaaagacataccagggggcgctaatcggttgttgtagtgtgctcatttgcggtgtactctggcggcgcatgctgcaccacgcaaaccataagagataagcgccgccgacgattctgataaggctaaaaatctcctcacactgcgtaattagcgttgcaagaccaaacaaacccaacccggaataaaatgcatcgcccagcgccacgcccagcccggtcagcacccctgcgcgtcgaccggaagccaggctggtttgtactaccacaaagagattggctcccggattaaaaaaagtaatcacgaacagtcctacggtcaggtaaacggcatgcaaaggatccatagtgatttcatccataaataagtgaactaactgcatcatatttctaccaaaaataatcgggtgcgagagagatcacaaagtgtcttatttccggttactggcgtttatgccctgactgaactaattattaatcaacccaataatgtgggtgggtgatagtgtgataacaactctggagccgtaatatgaaaataatctctaaaatgttagtcggtgcgttagcgttagccgttaccaatgtctatgccgctgaattgatgaccaaagcggaatttgaaaaagttgaaagccagtatgaaaaaataggtgatattagtaccagcaatgaaatgagcactgcagatgcaaaagaagatttgatcaaaaaagcggatgaaaaaggggctgatgtgttggtactgacctccggtcaaactgacaataagatccacggcacggcaaatatttataagaagaagtaattctgaatcctatgtaaacatctccgatgcgtaagtttatcggtgatcatctattgaaatttatgccggataaagcgttcgcgctgcattcggcagttcagcttttcagccgccgccagaacgtcgtccggctgatgcctaaataattcgccgctgctgttttatcgccattaaatttctccagtgcctgttgtggtgtcagtaagcgtggagcgggagttttcgcgctctcgcgcgccagttccggcagtagcagttgcataaactgcggcgttaaatccggcgtcggttccacacttaaaaacagcgccagtcgttccatcatattgcgcagttcacgaatattgcctggccagtcgtagtgcagcagcacagtttcacttgcctgtaacccctggcgtaatgcagcagaaaatggggcggagagcgccgccagagacactttcaaaaagctttccgccagcggaagaatatccgccacccgctcgcgcagtggtggcaattgcagacgcaaaatactcagccgataaaacagatcacggcgaaaacgtccttgctgcatatcttcttccagattgcagtgagtggcgctaatgacccgtacatctaccggaacaggctgatgcccgccgacgcgggtgacctctttttcttccagcacccgcagcagccgggtctgcaaaggtagcggcatttcgccaatctcatccagaaacagcgtaccgccgtgggcaatttcgaacagcccggcgcgacctccgcgtcggctgccggtaaacgccccttcctcatagccaaacagttctgcttccagcaggctttcggcaatcgccccgcagttgacggcaacaaacggatggctctttttgccctgtcgcgcatcgtggcgggcaaaatattcccgatgaatcgcctgggccgccagctctttgcccgtccccgtttccccctcaatcaacaccgccgcactggagcgggcatacagcaaaatagtctgccgtacttgttccatctgtggactttgaccgagcatatcgcccagcacgtaacgagtacgcagggcgttgcgggtggcatcgtgagtgttatggcgtaagctcatgcgcgtcatatccagcgcatcgctgaacgcctggcgcacggtggcggcggaatagataaaaattccggtcattccggcttcttctgccaaatcggtaatcagccctgcgccgaccaccgcttcggtgccgttagcttttagctcgttaatctgcccgcgtgcgtcttcctcggtaatgtagctacgttggtcgaggcgcaaattaaaggttttttgaaacgccaccagcgctggaatggtttcctgataggtgacaacgccgatagaagaggtgagttttccggcttttgccagtgcctgtaacacatcgtagccgctcggtttaatcaaaataactggcacactcaggcggcttttcaggtacgcgccgttagagccagccgcgatgatggcgtcacagcgttcgtttgccagtttcttgcggatgtaggtcactgctttttcaaagccaagctgaataggggtaatgttcgccaggtgatcaaactcgaggctgatatcgcgaaacagctcgaacaggcgcgttacagataccgtccagataaccggtttgtcgtcattaagccgtggtggatgtgccatagcgcaccgcaaagttaagaaaccgaatattgggtttagtcttgtttcataattgttgcaatgaaacgcggtgaaacattgcctgaaacgttaactgaaacgcatatttgcggattagttcatgactttatctctaacaaattgaaattaaacatttaattttattaaggcaattgtggcacaccccttgctttgtctttatcaacgcaaataacaagttgataacaaaggatgggctatgtctctacactctccaggtaaagcgtttcgcgctgcactgactaaagaaaatccattgcagattgttggcaccatcaacgctaatcatgcgctgttggcgcagcgtgccggatatcaggcaatttatctttctggcggtggcgtggcggcaggtagcctggggctgcccgatctcggtatttctacccttgatgatgtgctgaccgacattcgccgtatcaccgacgtttgtagcctgccgctgctggtggatgcggatatcggttttggttctagcgcctttaacgtggcgcgcaccgtgaaaagcatgattaaagccggtgcggcaggattgcatattgaagatcaggttggtgcgaaacgctgcggtcatcgtccgaataaagcgatcgtcagcaaagaagagatggtggatcggatccgcgcggcggtggatgcgaaaaccgatcctgattttgtgatcatggcgcgcaccgatgctctggcggtagaggggctggatgcggcgatcgagcgtgcgcaggcctatgttgaagcgggtgccgagatgttgttcccggaggcgattaccgaactcgccatgtaccgccagtttgccgatgcggtgcaggtgccgatcctcgccaacatcaccgaatttggtgccacgccgctgtttaccaccgacgaattacgcagcgcccatgtcgcaatggcgctgtacccacttagtgcgttccgcgccatgaaccgcgccgctgaacatgtctacaacgtcctgcgccaggaaggcacgcagaaaagcgtcatcgacaccatgcagacccgcaacgagctgtacgaaagcatcaactactaccagtacgaagagaagctcgacaacctgtttgcccgtagccaggtgaaataaaaaacgcccgttgattgtattcgacagccgatgcctgatgcgtcgctgacgcgacttatcaggcctacgaggtgcactgaactgtaggtcggataagacggatggcgtcgcatccgacaaccgatgcctgatgcgccgctgacgtgacttatcaggcctacggggtgcactgaactgtaggtcggataagacgcatagcgtcgcatccgacaaccgatgcctgatgcgccgctgacgcgacttatcaggcctacggggtgcactgaactgtaggtcggataagacgcatagcgtcgcatccgacaaccgatgcctgatgcgccgctgacgcgacttatcaggcctacggggtgaactgaactgtaggtcggataagacgcatagcgtcgcatccgacaacaatctcgaccctacaaatgataacaatgacgaggacaacatgagcgacacaacgatcctgcaaaacagtacccatgtcattaaaccgaaaaaatctgtggcactttctggcgttccggcgggcaatacggcgctctgcaccgtgggtaaaagtggcaatgacctgcattaccgcggctacgatattcttgatctggcgaaacattgcgaatttgaagaagtggcgcatctgctgatccacggcaaactgccgacccgtgacgaactcgccgcttacaaaacgaaactgaaagccctgcgcggtttaccggctaacgtgcgtaccgtgctggaagccttaccggcggcgagccacccgatggatgttatgcgcaccggtgtttccgcgctcggctgcacgctgccagaaaaagaggggcataccgtctctggcgcgcgggatattgccgacaaactgctggcgagccttagcagcattctcctttattggtatcactacagccacaacggcgaacgcatccaaccggaaaccgatgacgactccatcggcggtcacttcctgcatctgctgcacggcgaaaagccaagccaaagctgggaaaaggcgatgcatatcagcctggtgctgtacgccgaacacgagtttaacgcctccacctttaccagtcgggtgattgcgggcaccggctctgatatgtattccgcgattattggcgcgattggcgcactgcgcgggccaaaacacggcggggcgaatgaagtgagcctggagatccagcaacgctacgaaacgccggacgaagccgaagcagatatccgcaagcgcgtggaaaacaaagaagtggtcattggttttggtcatccggtttacaccatcgctgacccgcgccaccaggtgattaaacgtgtggcgaagcagctcagccaggaaggcggcagcctgaagatgtacaacatcgccgatcgcctggaaacggtgatgtgggagagcaaaaagatgttccccaatctcgactggttctctgctgtttcctacaacatgatgggcgttcccaccgagatgttcacaccactgtttgttatcgcccgcgtcaccggctgggcggcgcacattatcgaacaacgtcaggacaacaaaattatccgtccttccgccaattatgttggaccggaagaccgcccgtttgtcgcgctggataagcgccagtaaacctctacgaataacaataaggaaacgtacccaatgagtgctcaaatcaacaacatccgcccggaatttgatcgtgaaatcgttgatatcgtcgattacgtcatgaactacgaaatcagctctaaagtggcctacgacaccgcacattactgcctgctcgacacgctcggctgcggtctggaagctctcgaatacccggcctgtaaaaaactgctggggccaattgttcccggcaccgtcgtacccaacggcgtgcgcgtccccggaactcagttccagctcgaccccgtccaggcggcatttaacatcggcgcgatgatccgctggctcgatttcaacgatacctggctggcggcggagtggggccatccttccgacaacctcggcggcattctggcaacggcggactggcttagccgcaacgcggtcgccagcggcaaagcgccgttgaccatgaaacaggtgctgaccgcaatgatcaaagcccatgaaattcagggctgcatcgcgctggaaaactcctttaaccgcgtcggcctcgaccacgttctgttagtgaaagtggcttccaccgccgtggtcgccgaaatgctcggcctgacccgcgaggaaattctcaacgccgttagcctggcgtgggtggacggtcagagcctgcgcacctatcgccatgcgccgaacaccggcacgcgtaaatcctgggcggcgggcgatgccacttcccgcgcggtacgtctggcactgatggcgaaaacgggcgaaatgggttacccgagtgccctgactgcgccggtgtggggcttctacgacgtctcctttaaaggtgaaagcttccgcttccagcgcccgtacggttcctacgttatggaaaatgtgctgttcaaaatctccttcccggcggagttccactcccagacggcagttgaagcagcgatgacgctctatgaacagatgcaggcagcaggcaaaacggcggcggatatcgaaaaagtgaccattcgcacccacgaagcctgtattcgcatcatcgacaaaaaagggccgctcaataacccggcagaccgcgatcactgcattcagtacatggtggcgatcccgctgctattcgggcgcttaacggcggcagattacgaggacaacgttgcgcaagataaacgcattgacgccctgcgcgagaagatcaattgctttgaagatccggcatttaccgctgactaccacgacccggaaaaacgcgccatcgccaatgccattacccttgagttcaccgacggcacacgatttgaagaagtggtggtggagtaccccattggtcatgctcgccgccgtcaggatggtattccgaaactggtcgataaattcaaaatcaatctcgcgcgccagttcccgactcgccaacagcagcgcattctggaggtttctctcgacagagctcgcctggaacagatgccggtcaatgagtatctcgacctgtacgtcatttaagtaaacggcggtaaggcgtaagttcaacaggagagcattatgtcttttagcgaattttatcagcgtagcattaacgaaccggagcagttctgggccgagcaggcccggcgtattgactggcagacgccctttacgcaaacgctcgatcacagcaatccgccgtttgcccgttggttttgtgaaggccgaaccaacttgtgccacaacgccatcgaccgctggctggagaaacagccagaggcgctggcgctgattgccgtctctagcgaaacagaagaagagcgcacctttacctttcgtcagctgcatgacgaagtgaacgcggtggccagtatgttgcgtagtttgggtgtgcagcgcggcgatcgggtgctggtgtatatgccgatgattgccgaagcgcatattactctgctggcctgcgcgcgcattggcgctattcacagcgtggtgtttggtggatttgccagccacagcgtggcggcgcgaattgatgacgctaaaccggtgctgattgtcagcgctgatgccggagcgcgcggtggcaaaatcattccctataaaaaattgctcgacgatgcgataagtcaggcgcagcaccagccacgccatgttttgctggtggatcgcgggctggcgaaaatggcgcgcgtcagcgggcgggatgtcgatttcgcgagcttgcgccatcaacacatcggcgcgcgggtaccggtggcgtggctggaatccaacgaaacctcctgcattctctacacttccggcacgaccggcaaacctaaaggcgtgcagcgtgacgtcggcggatatgcggtggcgctggcgaccagcatggacaccatttttggcggcaaagcgggcagcgtgttcttttgcgcaagcgatatcggctgggtggtggggcatagctatatcgtttacgcgccgctgctggcggggatggcgactatcgtttacgaaggattgccgacctggccggactgcggcgtgtggtggacaatcgtcgagaaatatcaggttagccggatgttcagtgcgccgaccgccattcgcgtgctgaaaaaattccctaccgctgaaattcgcaaacacgatctcagcagcctggaagtgctctatctggctggagaaccgctggacgagccgaccgccagttgggtgagcaatacgctggatgtgccggtcatcgacaactactggcagaccgaatccggctggccgattatggcgattgctcgcggtctggacgacaggccgacgcgtctgggaagccccggtgtgccgatgtatggctataacgtgcagttgcttaatgaagtcaccggcgaaccgtgtggcgtcaacgagaaagggatgctggtggtggaagggccgctgccgccggggtgtattcagaccatctggggcgacgacggccgctttgtgaagacttactggagcctgttttcccgcccggtgtacgccacctttgactggggcatccgtgacgctgacggttatcactttattctcgggcgcactgacgatgtaattaacgttgccgggcatcggctggggacgcgcgagattgaagagagtatctccagccatccgggcgttgccgaagtggcggtggttggggtgaaagatgcgctgaaagggcaggtggcggtggcgtttgtcattccgaaagagagcgacagtctggaagatcgtgatgtggcgcacagccaagagaaggcgattatggcgctggtggacagccagattggcaactttggccgcccggcgcacgtctggtttgtcagccaattgccaaaaacgcgatccggaaaaatgctgcgccgcacgatccaggcgatttgcgaaggacgcgatcctggagatctgacgaccattgatgatcctgcgagcttggatcagatccgccaggcgatggaagagtaagttattgtcggatgcgtcgcgcggtgcatccggcactgtgtgccgatgcctgatgcgacgctgacgcgttttatcatgcctacggacctgaaccgtaggtcggataaggcgctcgcgtcgcatccgacaccatgctcagatgcctgatgcgacgctgacgcgtcttatcaggcctacccactgtttttacaccgataatttttcccccacctttttgcactcattcatataaaaaatatatttccccacgaaaacgattgctttttatcttcagatgaatagaatgcggcggattttttgggtttcaaacagcaaaaagggggaatttcgtgagccaagataacaactttagccaggggccagtcccgcagagcgcgcggaaaggggtattggcattgacgttcgtcatgctgggattaaccttcttttccgccagtatgtggaccggcggcactctcggaaccggtcttagctatcatgatttcttcctcgcagttctcatcggtaatcttctcctcggtatttacactagttttctcggttacattggcgcaaaaaccggcctgaccactcatcttcttgctcgcttcagctttggtgttaaaggcagttggctgcctagtctgctactgggcggaactcaggttggctggtttggcgtcggtgtggcgatgtttgccattccggtgggtaaggcaaccgggctggatattaatttgctgattgccgtttccggtttactgatgaccgtcaccgtcttttttggcattagcgcgctgacggttcttagcgtgattgcggttccggctatcgcctgcctgggcggttattccgtgtggctggctgttaacggcatgggcggcctggacgcattaaaagcggtcgttcccgcacaaccgttagatttcaatgtcgcgctggcgctggttgtggggagttttatcagtgcgggtacgctcaccgctgactttgtccggtttggtcgcaatgccaaactggcggtgctggtggcgatggtggcctttttcctcggcaacagcttgatgtttattttcggtgcagcgggcgctgcggcactgggcatggcggatatctctgatgtgatgattgctcagggcctgctgctgcctgcgattgtggtgctggggctgaatatctggaccaccaacgataacgcactctatgcgagcggtttaggtttcgccaacattaccgggatgagcagcaaaacccttagcgtaatcaacggtattatcggtacggtctgcgcattatggctgtataacaattttgtcggctggttgaccttccttagcgcagctattcctccagtgggtggcgtgatcatcgccgactatctgatgaaccgtcgccgctatgagcactttgcgaccacgcgtatgatgagtgtcaattgggtggcgattctggcggtcgccttggggattgctgcaggccactggttaccgggaattgttccggtcaacgcggtattaggtggcgcgctgagctatctgatccttaacccgattttgaatcgtaaaacgacagcagcaatgacgcatgtggaggctaacagtgtcgaataactaagacgcatgtggaggctaacagtgagcaataacgctttacaaacaattattaacgcccggttaccaggcgaagaggggctgtggcagattcatctgcaggacggaaaaatcagcgccattgatgcgcaatccggcgtgatgcccataactgaaaacagcctggatgccgaacaaggtttagttataccgccgtttgtggagccacatattcacctggacaccacgcaaaccgccggacaaccgaactggaatcagtccggcacgctgtttgaaggcattgaacgctgggccgagcgcaaagcgttattaacccatgacgatgtgaaacaacgcgcatggcaaacgctgaaatggcagattgccaacggcattcagcatgtgcgtacccatgtcgatgttagcgatgcaacgctaactgcgctgaaagcaatgctggaagtgaagcaggaagtcgcgccgtggattgatctgcaaatcgtcgccttccctcaggaagggattttgagctatcccaacggtgaagcgttgctggaagaggcgttacgcttaggggcagatgtagtgggggcgattccgcattttgaatttacccgtgaatacggcgtggagagcctgcataaaaccttcgccctggcgcaaaaatacgaccgtctcatcgacgttcactgtgatgagatcgatgacgagcagagccgctttgtcgaaaccgttgctgccctggcgcaccatgaaggcatgggcgcgcgagtcaccgccagccacaccacggcaatgcactcctataacggggcgtataccagtcgcctgttccgcttgctgaaaatgtccggtattaactttgtcgccaacccgctggtcaatattcatctgcaaggacgtttcgatacgtatccaaaacgtcgcggcatcacgcgcgttaaagagatgctggagtccggcattaacgtctgctttggtcacgatgatgtcttcgatccgtggtatccgctgggaacggcgaatatgctgcaagtgctgcatatggggctgcatgtttgccagttgatgggctacgggcagattaacgatggcctgaatttaatcacccaccacagcgcaaggacgttgaatttgcaggattacggcattgccgccggaaacagcgccaacctgattatcctgccggctgaaaatgggtttgatgcgctgcgccgtcaggttccggtacgttatagcgtacgtggcggcaaggtgattgccagcacacaaccggcacaaaccaccgtatatctggagcagccagaagccatcgattacaaacgttgaacgactgggttacagcgagcttagtttatgccggatgcggcgtgaacgccttatccggcctacgtagagcactgaactcgtaggcctgataagcgtagcgcatcaggcaattccagccgctgatctgtgtcagcggctaccgtgattcattcccgccaacaaccgcgcattcctccaacgccatgtgcaaaaatgccttcgcagcggctgtctgccagctgtagtttatgccggatgcggcgtgaacgccttatccggcctacgtagagcactgaactcgtaggcctgataagcgtagcgcatcaggcaattccagccgcagacctgtgtcagcggttaccgactttcatttccgccaacaaccgcgcatttatccaacgccatgtgcaaaaatgccttcgcggcggctgtctgccagctatttttccgccgcaacaaaaccgccgttctctccagtagtggcggggcaagagaaatagctttaagcccgtcatgttgtgtggcaatcgctgctggtaacaatgtggaaagggaagtgcggcgaatcagctccagaaccgcgctaatactgttcgcctcaatgaccacctgtggatgtagccccgctttctcgcagtagtggtcaatttgctctctggtggcaaattccgcgctgagcaggaccagtttttcatcatgcaagcgactcaacgccacctgttcatggacggccagcggatgatgttgcgccacgactaacgctaaactttctgtcagtaaaggaattgcctccagctccgggctatgcacaggcgcgaaggcaatcccaacgtccaactcgtcgcggcaaagcatatcctcgattttctcctggctcatttcctgtagctggagcgtgatgctgggatagcgcgcatagaaatccgccattaaggggccgataaagtagctcgtaaaggtgggggtgacggcgatacgcaggcttcctcgcgtcagatcggcaacatcatgaatcgcccgtttacccgcccccagttcctgtaacgcccggctggcgtactgtcgccagacttctcctgcatcagtgagacgaatcgttcgcccgctacggtcaaacagcggcacgcctaaactctcctctaactggcgaatctgctgggaaagcgcaggttgggagacgtgcaacgcactggcggcacgggtgaagctgccatgttcagccacggcaagaaaataattgatatgtcgagagagcattcgcaacctataagtaaatccaatggaactcatcataaatgagacttttaccttatgacaatcggcgagtagtctgcctctcattccagagacagacagaggttaacggtgaaagagattattgatggattccttaaattccagcgcgaggcatttccgaagcgggaagccttgtttaaacagctggcgacacagcaaagcccgcgcacactttttatctcctgctccgacagccgtctggtccctgagctggtgacgcaacgtgagcctggcgatctgttcgttattcgcaacgcgggcaatatcgtcccttcctacgggccggaacccggtggcgtttctgctagcgtggagtatgccgtcgctgcgcttcgggtatctgacattgtgatttgtggtcattccaactgtggcgcgatgaccgccattgccagctgtcagtgcatggaccatatgcctgccgtctcccactggctgcgttatgccgatagtgcccgcgtcgttaatgaggcgcgcccgcattccgatttaccgagtaaagctgcggcgatggtacgtgaaaacgtcattgctcagttggctaatttgcaaactcatccaagcgtgcgcctggcgctcgaagaggggcggatcgccctgcacggctgggtctacgacattgaaagcggcagcatcgcagcttttgacggcgcaacccgccagtttgtgccactggccgctaatcctcgcgtttgtgccataccgctacgccaaccgaccgcagcgtaaccttatttttaaaccatcaggagttccaccatgattcagagtcaaattaaccgcaatattcgtcttgatcttgccgatgccattttgctcagcaaagctaaaaaagatctcagttttgccgagattgccgacggcaccggtctggcagaagcctttgtaaccgcggctttgctgggtcagcaggcgcttcctgccgacgccgcccgcctggtcggggcgaagctggatctcgacgaagactccattctactgttgcagatgattccactgcgtggctgcattgatgaccgtattccaactgacccaacgatgtatcgtttctatgaaatgttgcaggtgtacggtacaaccctgaaagcgttggttcatgagaaatttggcgatggcattattagcgcgattaacttcaaactcgacgttaagaaagtggcggacccggaaggtggcgaacgtgcggtcatcaccttagatggtaaacatctgccgaccaaaccgttctgacagccatgcgcaaccatcaaaagacgttcacgatgctgctggtactggtgctgattggtcttaatatgcgaccactgctcacctccgtcgggccactgctaccgcaattgcgccaggcgagcggaatgagctttagcgtggctgccctgttgaccgctctgccggtggttaccatgggcgggctggcgctggccggaagctggcttcatcagcatgtcagcgaacgtcgcagtgtcgccatcagtctgttgctgattgccgtcggtgcattgatgcgtgagctttacccgcaaagtgcgctgctgcttagcagcgcactgcttggtggggtggggatcggcatcattcaggcggtgatgcctagcgtgattaaacggcggtttcagcagcgcacgccactggtgatggggctgtggtccgcggctctgatgggcggcggtgggcttggtgccgccataacgccctggttagttcaacatagcgaaacctggtatcaaacactcgcctggtgggcgctgcctgccgttgttgcgctctttgcctggtggtggcaaagcgcccgcgaggtcgcctcttcccacaagacaacaaccactccggttcgcgtggtattcactccccgcgcgtggacgctgggtgtttacttcggtctgattaacggcggttacgccagcctgattgcctggttacccgctttctatattgagattggtgccagcgcgcagtacagcggttccttactggcattgatgacgcttgggcaagccgcaggagctttgctgatgcctgctatggctcgccatcaggatcggcgcaaactgttaatgctggcgctggtgttacaactggtggggttctgcggctttatctggctgccgatgcaattgccggtattgtgggcgatggtgtgtgggttaggtctgggcggcgcgtttccgctctgtttgctgctggcgctcgatcactctgtgcaaccggctattgctggcaagctggtggcgtttatgcagggaatcggttttatcatcgccgggcttgccccgtggttttctggcgtgctgcgtagtatcagcggcaattacctgatggactgggcatttcatgcgctgtgcgtcgttgggctgatgatcataaccctgcgttttgcaccagtacgttttccgcagctgtgggtcaaagaggcatgatgcgacgcttgttcctgcgctttgttcatgccggatgcggctaatgtagatcgctgaacttgtaggcctgataagcgcagcgtatcaggcaatttttataatttaaacactgctttcaactttataatctttgaaataatagtgcttatcccggtcgtttatttcgcgaataacccgacaaggaacgccagccgccacgacgtttggtggaatgtcttttgtgacgatactacccgcgccaataacagaattatccccgatggtgacgcctggattaataaccacatgacttccgatccagacgttattgccaatcgttatcggaaaagagtacatctcgccgttttttctcaattcatggtgtacagggtgtcccgtaacggaaagagtaacgttgggtgcaatcagtacgttatcaccgattgttaccgtgtagtcatcgacaatggttaaattgaaatttgcataaaaattgcggcctatatggatgttggaaccgtaagagaaatagacaggcggttctacccaggcgttttcccctaccgtggcaaacatttctttaatcaggctttctcttttttcaacttcacttggatggctgtgattaaactcatacattaacgttttcccacgaagtcttttttccggtaagccttcgcacatatcggtaaatagcttgcctgctcttattctttcggtcattggcatgttcaatgcgatcactccgttatgatatgttggtcggataaggcgctcgcgccgcatccgacattgattgcttaagcgacttcattcacctgacgacgcagcagggaaagcgggccggggccgctaagcgtgaacacggaaattaaggtgaagcccagcgccaccagacccagcaccagataagcgccctggaaaccgatgctttcatacatattgcccgccagtacagacataaaaatcatcgccagttgcttaaagaagcagaaacagaccagataaatcgtcgcactaaaacgcacttcaaactggctggtaatatatttaaagcagcccaccagcaggaacggtacttcaaacatatgcagcgttttcagaataaccacttccagcgcactggtggcgaagctactgccaataatacgtacagacataatagtgccagccagcagcagggcgtttttcccaccgatgcgattaatgatcagtggcgcaaagaacataatgctggcgttaagtaattcgcccattgtcgttacgtagccaaatacccgcgtaccctgttcaccggtagcaaagaagctagtaaagaaattagcaaactgttggtcaaaaacatcgtaggtgcaggaaacgccaataacatacagactcaaaaaccacagttttggctgtctgaacagttccagtgccagcttaaggctaaatgcgctatggttggcacctaccgcattggcaaccgtggcagaagagggcgcatccgttttggcgaaaaagagtaaaacggcgaggatgagtgcacagccagagcccagccagaaaacaaactgattattgatggtgaacatgatgccgacaatgctggcacacagcgcccagccaacacagccaaacatccgcgcgcgaccaaattcgaaattactgcgacggctgactttctcaataaatgcctctactgctggcgcaccggcgttaaaacaaaagcctagataaataccaccaacaatgcttcctactaaaatgttgtattgtaacagtggcccgaagataaaaataaagaacggcgcaaacatcactaacatgccggtaataatccacagcaggtatttgcgcagcccgagtttgtcagaaagcagaccaaacagcggttggaataataggctgaacagagaaatagcggcaaaaataatacccgtatcacttttgctgatatggttgatgtcatgtagccaaatcgggaaaaacgggaagtaggctcccatgataaaaaagtaaaagaaaaagaataaaccgaacatccaaaagtttgtgttttttaaatagtacataatggatttccttacgcgaaatacgggcagacatggcctgcccggttattattatttttgacaccagaccaactggtaatggtagcgaccggcgctcagctggaattccgcgcttacactcgggctccaggagtcgtcgccaccaatccccatatggaaaccgtcgatattcagccatgtgccttcttccgcgtgcagcagatggcgatggctggtttccatcagttgctgttgactgtagcggctgatgttgaactggaagtcgccgcgccactggtgtgggccataattcaattcgcgcgtcccgcagcgcagaccgttttcgctcgggaagacgtacggggtatacatgtcactcaatggcagatcccagcggtcaaaacaggcggcagtaaggcggtcgggatagttttcttgcggccctaatccgagccagtttacccgctctgctacctgcgccagctggcagttcaggccaatccgcgccggatgcggtgtatcgctcgccacttcaacatcaacggtaatcgccatttgaccactaccatcaatccggtaggttttccggctgataaataaggttttcccctgatgctgccacgcgtgagcggtcgtaatcagcaccgcatcagcaagtgtatctgccgtgcactgcaacaacgctgcttcggcctggtaatggcccgccgccttccagcgttcgacccaggcgttagggtcaatgcgggtcgcttcacttacgccaatgtcgttatccagcggtgcacgggtgaactgatcgcgcagcggcgtcagcagttgttttttatcgccaatccacatctgactaagaaagccactctggcggttaaattgccaacgcttattacccagctcgatgcaaaaatccatttcgctggtggtcagatgcgggatggcgtgggacgcggcggggagcgtcacactgaggttttccgccagacgccactgctgccaggcgctgatgtgcccggcttcactccatgcggtcgcgttcggttgcactacgcgtactgtgagccagagttgcccggcgctctccggctgcggtagttcaggcagttcaatcaactgtttaccttgtggagcgacatccagaggcacttcaccgcttgccagcggcttaccatccagcgccaccatccagtgcaggagctcgttatcgctatgacggaacaggtattcgctggtcacttcgatggtttgcccggataaacggaactggaaaaactgctgctggtgttttgcttccgtcagcgctggatgcggcgtgcggtcggcaaagaccagaccgttcatacagaactggcgatcgttcggcgtatcgccaaaatcaccgccgtaagcgctccacgggttgccgttttcatcatatttaatcaggctctgatccacccagtcccagacgaagccgccctgtaaacggggatactgacgaaacgcctgccagtatttagcgaaaccgccaagactgttacccatcgcgtgggcgtattcgcaaaggatcagcgggcgcgtctctccaggtaggctaagccattttttgatggaccatttcggcacagccgggaagggctggtcttcatccacgcgcgcgtacatcgggcaaataatatcggtggccgtggtgtcggctccgccgccttcatactgcaccgggcgggaaggatcgacagatttgatccagcgatacagcgcgtcgtgattagcgccgtggccactttcattccccaggctccagatgatcacactcgggtgattacgatcgcgctgcaccattcgcgttacgcgttcgctcatcgccggtagccagcgcggatcatcggtcagacgattcattggcaccatgccgtgggtttcaatattggcttcatccaccacatacaggccgtagcggtcgcacagcgtgtaccacagcggatggttcggataatggctacagcgcacggcgttaaagttgttctgcttcatcagcaggatatcctgcaccatcgtctgctcatccatgacctgaccatgcagaggatgatgctcgtgacggttaacgcctcgaatcagcaacggcttgccgttcagcagcagcagaccattttcaatccgcacctcgcggaaaccgacatcgcaggcttctgcttcaatcagcgtgccgtcggcggtgtgcagttcaaccaccgcacgatagagattcgggatttcggcgctccacagtttcgggttttcgacgttcagacgtagtgtgacgcgatcggcataaccaccacgctcatcgataatttcaccgccgaaaggcgcggtgccgctggcgacctgcgtttcaccctgccataaagaaactgttacccgtaggtagtcacgcaactcgccgcacatctgaacttcagcctccagtacagcgcggctgaaatcatcattaaagcgagtggcaacatggaaatcgctgatttgtgtagtcggtttatgcagcaagctgacgtcacggaaaatgccgctcatccgccacatatcctgatcttccagataactgccgtcactccagcgcagcaccatcaccgcgaggcggttttctccggcgcgtaaaaatgcgctcaggtcaaattcagacggcaaacgactgtcctggccgtaaccgacccagcgcccgttgcaccacagatgaaacgcgctgttaacgccatcaaaaataattcgcgtctggccttcctgtagccagctttcatcaacattaaatgtgaggctgtaacaacccgtcggattctccgtgggaacaaacggcggattgaccgtaatgggataggtcacgttggtgtagatgggcgcatcgtaaccgtgcatctgccagttactggggacgacgacagtatcggcctcaggaagatcgcactccagccagctttccggcaccgcttctggtgccggaaaccaggcaaagcgccattcgccattcaggctgcgcaactgttgggaagggcgatcggtgcgggcctcttcgctattacgccagctggcgaaagggggatgtgctgcaaggcgattaagttgggtaacgccagggttttcccagtcacgacgttgtaaaacgacggccagactatccgtaatcatggtcatagctgtttcctgtgtgaaattgttatccgctcacaattccacacaacatacgagccggaagcataaagtgtaaagcctggggtgcctaatgagtgagctaactcacattaattgcgttgcgctcactgcccgctttccagtcgggaaacctgtcgtgccagctgcattaaactatcggccaacgcgcggggagaggcggtttgcgtattgggcgccagggtggtttttcttttcaccagactgacgggcaacagctgattgcccttcaccgcctggccctgagagagttgcagcaagcggtccacgctggtttgccccagcaggcgaaaatcctgtttgatggtggttaacggcgggatataacaactgctgtcttcggtatcgtcgtatcccactacgctgatatccgcaccaacgcgcagcccggactcggtaatggcgcgcattgcgcccagcgccatctgatcgttggcaaccagcatcgcagtgggaacgatgccctcattcagcatttgcatggtttgttgaaaaccggacatggcactccagtcgccttcccgttccgctatcggctgaatttgattgcgagtgagatatttatgccagccagccagacgcagacgcgcgctgacagaacttaatgggcccgctaacagcgcgatttgctggtgacccaatgcgaccagatgctccacgcccagtcgcgtaccgtcttcatgggagaaaataatactgttgatgggtgtctggtcagagacatcaagaaataacgccggaacattagtgcaggcagcttccacagcaatggcatcctggtcatccagcggatagttaatgatcagcccactgacgcgttgcgcgagaagattgtgcaccgccgctttacaggcttcgacgccgcttcgttctaccatgctcaccaccacgctggcacccagttgatcggcgcgagatttaatcgccgcgacaatttggctcggcgcgtgcagggccagactggaggtggcaacgccaatcagcaagctctgtttgcccgccagttgttgtgccacgcggttgggaatgtaattcagctccgccatcgccgcttccactttttcccgcgttttcgcagaaacgtggctggcctggttcaccacgcgggaaacggtctgataagagacaccggcatactctgcgacatcgtataacgttactggtttcacattcaccaccctgaattgactctcttccgggcgctatcatgccataccgcgaaaggttttgcgccattcgatggtgtcaacgtaaatgcatgccgcttcgccttccggccaccagaatagcctggctttcaaccccttcttcgatctgttttgctacccgttgtagcgccggaagatgcttttccgctgcctgttcaatggtcattgcgctcgccatatacaccagattcagacagccaatcacccgttgttcactgcgcagcggtacggcgatagaggcgatcttctcctcctgatcccagccgcggtagttctgtccgtaaccctctttgcgcgcgcgcgccagaatggcttccagctttaacggttcccgtgccagttgatagtcatcaccggggcgggaggctaacatttcgattaattccttgcggtcttgttccgggcaaaaggccagccaggtcaggccgctggcggttttcagaagcggcaaacgtcgcccgaccattgcccggtgaaaggataagcggctgaaacggtgagtggtttcgcgtaccaccattgcatcaacatccagcgtggacacatctgtcggccataccacttcgcgcaacagatcgcccagcagtggggccgccagtgcagaaatccactgttcgtcacgaaatccttcgcttaattgccgcactttgatggtcagtcgaaaactatcatcggaggggctacggcggacatatccctcttcctgcagcgtctccagcagtcgccgcacagtggtgcgatgcaggccgctgagttccgccagcagcccgacgctggcaccgccatcaagtttatttaacatatttaataacattagaccgcgggttaagccgcgcacggttttgtattccgtctgctcattgttctgcatattaatactcatttctatagttaaaacaacgtggtgcacctggtgcacattcgggcatgttttgattgtagcgctaaacacccttcctatactgagcgcacaataaaaaatcatttacatgtttttaacaaaataagttgcgctgtactgtgcgcgcaacgacattttgtccgagtcgtgaggtactgaaatggcaatacaacaccctgacatccagcctgctgttaaccatagcgttcaggtggcgatcgctggtgccggcccggttgggctgatgatggcgaactatctcggccagatgggcattgacgtgctggtggtggagaaactcgataagttgatcgactacccgcgtgcgattggtattgatgacgaggcgctgcgcaccatgcagagcgtcggcctggtcgatgatgttctgccgcacactacgccgtggcacgcgatgcgttttctcaccccgaaaggccgctgttttgctgatattcagccaatgaccgatgaatttggctggccgcgccgtaacgcctttattcagccgcaggtcgatgcggtgatgctggaaggggtgagccgttttccgaatgtgcgctgcttgttttcccgcgagctggaggccttcagtcagcaagatgacgaagtgaccttgcacctgaaaacggcagaagggcagcgggaaatagtcaaagcccagtggctggtagcctgtgacggtggagcaagttttgtccgtcgcactctgaatgtgccgtttgaaggtaaaactgcgccaaatcagtggattgtggtagatatcgccaacgatccgttaagtacgccgcatatctatttgtgttgcgatccggtgcgcccgtatgtttctgccgcgctgcctcatgcggtacgtcgctttgaatttatggtgatgccgggagaaaccgaagagcagctgcgtgagccgcaaaatatgcgcaagctgttaagcaaagtgctgcctaatccggacaatgttgaattgattcgccagcgtgtctacacccacaacgcgcgactggcgcaacgtttccgtattgatcgcgtactgctggcgggcgatgccgcgcacatcatgccggtatggcaggggcagggctataacagtggtatgcgcgacgcctttaacctcgcatggaaactggcgttggttatccaggggaaagcccgcgatgcgctgctcgatacctatcaacaagaacgtcgcgatcacgccaaagcgatgattgacctgtccgtgacggcgggcaacgtgctggctccgccgaaacgctggcagggtacgttacgtgacggcgtttcctggctgttgaattatctgccgccagtaaaacgctacttcctcgaaatgcgcttcaagccgatgccgcaatattacggcggtgcgctgatgcgtgagggcgaagcgaagcactctccggtcggcaagatgtttattcagccgaaagtcacgctggaaaacggcgacgtgacgctgctcgataacgcgatcggcgcgaacttcgcggtaattggctggggatgcaatccactgtgggggatgagcgacgagcaaatccagcagtggcgcgcgttgggcacacgcttcattcaggtggtgccggaagtgcaaattcataccgcacaggataaccacgacggcgtactacgcgtgggcgatacgcaaggtcgcctgcgtagctggttcgcgcaacacaatgctagcctggtggtgatgcgcccggatcgctttgttgccgccaccgccattccgcaaaccctgggcaagaccctgaataaactggcgagcgtgatgacgctgacccgccctgatgccgacgtttctgtcgaaaaggtagcctgatatgcacgcttatcttcactgtctttcccacagcccgctggtggggtatgtcgacccggcgcaagaggtgctcgatgaggtcaatggcgtgattgccagcgcccgcgagcgtattgcggcattctcccctgaactggtggtgctgtttgcgccagatcactacaacggctttttctatgacgtgatgccaccgttctgtttaggcgttggagcgacggcaattggtgatttcggcagtgcggcaggagagctgcccgtgcctgtggagctggcggaggcctgtgcgcatgccgtcatgaagagcgggatcgatcttgccgtttcttactgtatgcaggtggaccacgggttcgcccagccgctggagttcctgctcggtgggctggataaggtgccagttctgcctgtgttcatcaacggtgtcgccacgccgctgcccggtttccagcgtacccgcatgttgggtgaagccattggacgtttcaccagcactctcaataaacgcgtgctgttcctgggttccggtgggctttcccatcagccgccggtgcccgaactggcgaaagccgatgcccatatgcgcgaccgtctgttggggagcgggaaagatttacccgccagtgagcgcgaattgcgtcagcaacgggtgattagcgccgctgagaagtttgttgaggatcagagaacgctgcatccgctcaacccgatttgggataaccagttcatgactttgctggagcagggacgcatacaggaactggatgccgtcagtaacgaagagctttccgccattgccggaaagagcacacatgaaatcaaaacctgggtcgccgcttttgccgctatttctgcgtttggcaactggcgtagcgaagggcgttattaccgcccaatcccggagtggattgccggatttggcagcttaagcgccagaacagagaactgaatatgcaggagaagatgatgagttatcagccacaaaccgaagccgccaccagccgttttctgaatgtagaagaagcgggtaaaacgctgcgcatccattttaatgactgcggacaaggcgacgaaaccgttgtcctgctgcatggttccggcccgggtgctactggctgggcgaacttcagccgcaatatcgatccgctggtagaggcgggctatcgggtgatcctgctggattgtccgggttggggcaagagcgatagcgtcgttaatagtggtagccgaagcgatcttaatgcacgaatcctgaaaagcgtggtggatcaactggatatcgccaaaatccacctgctgggcaacagcatggggggccatagttctgtggcgttcacccttaaatggccggagcgcgtcggcaaactggtgctgatgggcggcggtacgggcggcatgagtttgtttacgccgatgccaaccgaaggtattaagcgactgaatcagctttatcgtcagccgactatcgaaaacctgaagctgatgatggatatcttcgtttttgataccagcgatttgaccgacgccctgtttgaagcgcgcctgaataatatgctgagccgccgcgatcacctggaaaacttcgttaagagcctggaagctaatccgaaacagttcccggattttggcccacgtctggcggaaatcaaagcgcaaaccctgattgtctgggggcgcaacgaccgctttgtgccgatggatgcgggtctgcgtctgctgtccggcattgccggttctgaactgcatatcttccgcgactgtggtcactgggcgcagtgggaacatgccgacgctttcaatcaactggtgctgaatttcctcgcacgcccttaaggaatggtcatgacgaagcatactcttgagcaactggcggcggatttacgccgcgccgcagagcagggcgaagcgattgcaccgctgcgcgatctgattggtatcgataacgctgaagcggcttacgccattcagcacataaatgtgcaacatgacgttgcgcaggggcgtcgcgtggtagggcgtaaagtgggcctgacacatccgaaagtgcaacaacaactgggcgttgatcaaccggattttgggacgttatttgccgacatgtgttatggcgataacgaaatcattcctttttcccgtgttctgcaaccccgcattgaagcggagatcgcactggtgttgaaccgcgatttgcccgcaaccgatatcaccttcgacgaattgtataacgccattgaatgggtacttccggcgctggaagtggtggggagccgcattcgcgactggagcattcagtttgtcgataccgtggcagataacgcctcctgtggggtgtatgtcatcggcggtccggcgcaacgtccggcggggttagacctgaaaaactgcgccatgaagatgacgcgtaataacgaagaggtttctagcgggcgcggcagcgaatgcctgggacatccgcttaatgcggccgtctggctggcacgcaaaatggccagtctgggtgaaccgctgcgcaccggagatatcattcttaccggggcattaggtccgatggtggcggtgaatgcgggcgatcgttttgaagcccatattgaaggcataggtagtgttgctgcgacatttagtagcgcagccccaaaaggaagtctgagttgagctaagccccaaaaggaagtctgtcatgagtaagcgtaaagtcgccattatcggttctggcaacattggtaccgatctgatgattaaaattttgcgtcacggtcagcatctggagatggcggtgatggttggcattgatcctcagtccgacggtctggcgcgcgccagacgtatgggcgtcgccaccacccatgaaggggtgatcggactgatgaacatgcctgaatttgctgatatcgacattgtatttgatgcgaccagcgccggtgctcatgtgaaaaacgatgccgctttacgcgaagcgaaaccggatattcgcttaattgacctgacgcctgctgccatcggcccttactgcgtgccggtggttaacctcgaggcgaacgtcgatcaactgaacgtcaacatggtcacctgcggcggccaggccaccattccaatggtggcggcagttagtcgcgtggcgcgtgttcattacgccgaaattatcgcttctatcgccagtaaatctgccggacctggcacgcgtgccaatatcgatgaatttacggaaaccacttcccgagccattgaagtggtgggcggcgcggcaaaagggaaggcgattattgtgcttaacccagcagagccaccgttgatgatgcgtgacacggtgtatgtattgagcgacgaagctagtcaagatgatatcgaagccagtatcaatgaaatggctgaggcggtgcaggcttacgtaccgggttatcgcctgaaacagcgcgtgcagtttgaagttatcccgcaggataaaccggtcaatttaccgggcgtggggcaattctccggactgaaaacagcggtctggctggaagtcgaaggcgcagcgcattatctgcctgcctatgcgggcaacctcgacattatgacttccagtgcgctggcgacagcggaaaaaatggcccagagtctggcgcgcaaggcaggagaagcggcatgaacggtaaaaaactttatatcagcgacgtcacattgcgtgacggtatgcacgccattcgtcatcagtatagcctggaaaacgttcgccagattgccaaagcactggacgatgcccgcgtggatagcattgaagtggcccacggcgacggtttgcaaggttccagctttaactatggtttcggcgcacatagcgaccttgaatggattgaagcggcggcggatgtggtgaagcacgccaaaatcgcgacgttgttgctgccaggaatcggcactattcacgatctgaaaaatgcctggcaggctggcgcgcgggtggttcgtgtggcaacgcactgtaccgaagctgatgtttccgcccagcatattcagtatgcccgcgagctcggaatggacaccgttggttttctgatgatgagccatatgaccacgccggagaatctcgccaagcaggcaaagctgatggaaggctacggtgcgacctgtatttatgtggtggattctggcggtgcgatgaacatgagcgatatccgtgaccgtttccgcgccctgaaagcagagctgaaaccagaaacgcaaactggcatgcacgctcaccataacctgagtcttggcgtggcgaactctatcgcggcggtggaagagggctgcgaccgaatcgacgccagcctcgcgggaatgggcgcgggcgcaggtaacgcaccgctggaagtgtttattgccgccgcggataaactgggctggcagcatgggaccgatctctatgcgttaatggatgccgccgacgacctggtgcgtccgttgcaggatcgaccggtacgagtcgatcgcgaaacgctggcgctgggatacgctggtgtttacagcagcttcctgcgtcactgtgaaacggcggcggcgcgttatggcttaagtgcggtggatattctcgttgagctgggcaaacgccggatggttggcggccaggaggatatgatcgttgacgtggcgctggatctgcgcaacaacaaataatgatgactgccgagaacgtgcattttgtatgcccatcccagcacgactgccggatgcggcgtgaacgccttatccggcctacggatggcgtgagaatttgtaggtctgataagacgcgttagcgtcgcatcaggcatctgcgcacgactgccggatgcggcgtgaacgccttatccggcctacggatggcgcgggaatttgtaggcctgataagacgcgttagcgtcgcatcaggcatctgcgcacgactgccggatgcggcgtgaacgccttatccggcctacgggtggcgcgagaatttgtaggcctgataagacgcgttagcgtcgcatcaggcatctgcgcacgactgccggatgcggcgtaaacgccttatccggcctacggatggcgcgggaatttgtaggcctgataagacgcgttagcgtcgcatcaggcatctgcacacgactgccggatgcgataaacgtcttgtccggcctacatttcgcccgtaggcagtcattaaatagttctgattacgcggctggcaatgtatcagtcgcgattcacctgcactcgcaacgaggttcatcttatgagcactcgtacccctagtagttctagttcccgcctgatgctgaccatcgggctttgttttttggtcgctctgatggaagggctggatcttcaggcggctggcattgcggcgggtggcatcgcccaggctttcgcactcgataaaatgcaaatgggctggatatttagcgccggaatactcggtttgctacccggcgcgttggttggcggaatgctggcggaccgttatggtcgcaagcgcattttgattggcagtgttgcgctgtttggtttgttcagtctggcaacggcgattgcctgggatttccccagtctggtctttgcgcggctgatgaccggtgtcgggctgggggcggcgttgccgaatcttatcgccctgacgtctgaagccgcgggtccacgttttcgtgggacggcagtgagcctgatgtattgcggtgttcccattggcgcggcgctggcggcgacactgggtttcgcgggggcaaacttagcatggcaaacggtgttttgggtaggtggtgtggtgccgttgattctggtgccgctattaatgcgctggctgccggagagcgcggttttcgctggcgaaaaacagtctgcgccaccactgcgtgccttatttgcgccagaaacggcaaccgcgacgctgctgctgtggttgtgttatttcttcactctgctggtggtctacatgttgatcaactggctaccgctacttttggtggagcaaggattccagccaagccaggcggcaggggtgatgtttgccctgcaaatgggggcggcaagcgggacgttaatgttgggcgcattgatggataagctgcgtccagtaaccatgagcctactgatttatagcggcatgttagctagcctgctggcgcttggaacggtgagcagttttaacggtatgttgctggcgggatttgtcgcggggttgtttgcgacaggtgggcaaagcgttttgtatgccctggcaccgttgttttacagtagccagatccgcgcaacaggtgtgggaacagccgtggcggtagggcgtctgggggctatgagcggtccgttactggccgggaaaatgctggcattaggcactggcacggtcggcgtaatggccgcttctgcaccgggtattcttgttgctgggttggcggtgtttattttgatgagccggagaagtcgaatacagccgtgcgccgatgcctgacgtgccttattaggcaggggcgaaagggacttcaccccaatacacctacggcgtttacaggtatactcgctaaaaattattcagcgggtttggaaacaaagatggcaaaacttaccttacaagagcagttgctcaaagcaggattagtcaccagcaaaaaagcggcgaaggtggagagaacggcgaaaaaaagccgcgttcaggcgcgtgaagctcgggcggcggtagaagaaaataaaaaggcacagcttgagcgtgataaacagcttagcgaacagcaaaaacaagcggcgttggcgaaagaatataaagctcaggtgaagcagcttattgaaatgaaccgaatcaccattgccaatggcgatattggttttaacttcactgacggcaatctgattaagaagatttttgtcgataagctcacacaggcgcagttgattaatggtcgtctggcgattgcccgcttgttggtcgataacaatagcgaaggtgaatacgccattattcccgccagcgttgccgataaaattgctcagcgcgatgccagcagtatagtgttgcacagcgcgctcagcgccgaagagcaggatgaagacgacccgtatgccgacttcaaagtgcctgatgatttgatgtggtaaacatagataagtcgtgcgcagatgcctgatgcgacgctatgcgcgtcttatcaggcctacggtttatgggcgaagtgtagaccggataaggcgttcacgccgcatccggcagtcgtgcgccatgcctgatgcgacgctttgcgcgtcttatcaggcctacggcttacgggcgaagtgtaggccggataaggcgttcacgccgcatccggcagtcgtgctattatcaacgcatattcagtttattggcgtggtaggcaatatgctcgccaataaaactggagacaaaataatagctgtgatcataaccctcgtgataacggattaacgtcttgatattcatctcctggcagatcttttcaagatttggagtccgcagctgttctgcgtaaaaatcatcactcaacccctgatcaaccatgatttccgcaacgcgttgaccttgactaataagactcaccgggtcgtaatccaaccaggcatctttattttcagcaagatatgcagcaaaggcttgctgtccccacggcacttggcttggggagacaatggggctaaacgcgctgacgctgacatattcatctgggttacgtaacgccagcaccagcgcgcccagcccgcccatagaatgaccagagatagactttttggccgttgccggaaaatgatgcatcactaaatccggcagctcgttgcggatatagtcatacattttgtaatgttcattccacggcgcttgcgtcgcgttcaggtaaaacccggcaccttgcccgagatcgtaacggtcagcatctgcgacatgactgcctcgcggactggtgtccggcgcaacaacaataatgttgtgctcagccgcgtaacgctgcatcccgcttttagtaatgaaattctgctcgttgcaggtcaggccactaagccagtacagcaccggcaatttttcattcgcggcttttggtgggagatagacgccgacattcatttcacatttcagactttgggaataatgccgatacatattttgccagccgccaaagctgacatgtttttcaatgagttccatcagtcattatctcagggttaatcccccggacggctgcccggggagagtattaagaacccccgcctgaagtggacggggtaaacctgcgggaaatcagtaacgaattacggttcgaatggatttgccttcatgcatcaggtcgaaggcgtcattaatttcatccaggctcatggtatgcgtgacaaacggttccagatcgatatcacctttcatcgcatcttcaaccatgcccggtaactgggaacgacctttcacgccgccaaacgcggaacctttccatacgcgaccagtgaccaactggaatggacgggtggagatttcctgaccggcaaccgcgaccccgatgatcacgctctgaccccagccgcggtgcgcactttccagcgccgcacgcatcacgttgacgttaccgatgcattcaaaggtatggtcgataccccatttgttgatatccaacaggacatcttttatcggtttgtcgtagtcattcgggttaatgcagtcggtagcaccgaagcgacgcgccagatcgaatttcttcgggttggtatcgatagcgataatccgacccgctttcgcctgacgcgcgccctgaaccactgccagaccaatcgcgccaagaccaaacacggcaacagaatcacctggctggactttagctgtgttgtgtaccgcgccaataccggtggtcacgccacagcccagcaggcagacgtgttcatggtttgcttctggattaatttttgccagagacacttccgcgactacggtgtattcactgaatgtagagcaccccatgtagtgataaagcggctgcccgttgtaagaaaaacgggtggtgccgtctggcatcaggcctttaccctgggtttcgcgaaccgcaacacagaggttagttttgccagaacgacagaactcacactcgccgcactccgcggtgtaaagcgggatcacatggtcgccaggtttgacgctggttacgccttcaccgacttcaaccacaacgccggccccttcgtgaccgagaaccaccgggaatacaccttccgggtcatcgccggagagggtaaatgcgtcggtatggcaaacgccggtatgggtgactttaattagcacttcaccttttttcggtggtgcaacgtcaatttcaacgatttccagcggtttaccgggagcaaatgcaacggcagcacgacttttcatctctcgctcttcctcaatatggtaatagattcagttatttaagataggcacgaaccagttcaatagtgtcgtcaacggattggctgacttcgcggctgtagcagtcatttcggtcaaacgtttcccggatatggctttcaagcacttctgccatcagcccattagccgcgccccgaacggcagcgatctgttggagtatggcacggcattcggcatcaccctccaggctccgttccagagcatcaatctgcccccgaatacgacgaactcgagtaaggacctttttcttctcttccggagtactgggcatttcgcacctcatcatctgcatgcaatatactataggggggtattctatatgtcaatgcatacccccctatagtatataacactggagaataaaatttatccggtgaatgtggtcggaaaacaaagaggaaaggggggggggctaatcggcagggaaggccgccccggatagcgggcggcagaaggaatcagaatttccaggtcagacgggctgcaagttgcagaccgttacgagatggacggtcccctcgcccccttggggagagggttagggtgagggggcgttcaccgtactttcaacaggttaactccccctttctgagaggaaacaaaattaacgcagaatcttcttctcagccaaatccagcgcaaagtagctgaaaatcagatccgcacccgcacgcttaatgctacctaagctttcgagcacgactttctcttcatctatagcacccgccagcgcggcgaacttaatcatcgcatactcaccgctcacctgatacgcgccaatcggcaattcagtacgttcacgcagctcacgcacgatgtcgaggtacgctccagcaggtttaaccatcaggcagtctgcgccctgggcttcatccagcagactttcacgaatcgcctcacgacggttcattgggttcatctgatagcttttgcggtcgccttttaatgcgcttccggcagcttcacggaacgggccataaaaggaggaggcgaacttggtgctatagctcataatcgccgtatctttaaatcccgcagcgtccagcgcctgacgaatcgcctgtacctggccgtccatcgcggcggaaggggcgatgaagtctgcacctgcagcagctgcaaccacggcttgcttgcctaaattttccagagtcgcgtcgttgtcgacgccatgctcgcacagcacaccgcagtgaccgtgagaagtgtattcacagaagcaggtgtcactcataacgatcatttctggcacggtctgcttgcagatgcggctcatacgcgccaccagtccatcttcccgccaggcatcgctgccggtttcatcggtatggtgagagatgccaaaagtcatcacggaacgaataccggcgttggcgatgcgttcaatttcgcgtgccagatgtttctctggaatgcgcatcacgcctggcatggcttcaacggctttgtagtcgtcaatttcttcttcaacaaagatcggcaacaccaggtcgttaaggctaagtgttgtctcttcaaacatagcgcgcagcgcaggagatttgcgcaggcgacgagggcgttggattaagtctgtcatggtctgcctgatgtttgtggaatcgaggggcatagtatacctgaagcagggtagggatgttttacgaaagttgtcgcgatgttgacaagaagagaatggaagagaggccaggacatctttttaatagaaacagcaataattttatattcactgaaaatatttttaatcttgaatattatcgggcgttaaaatattacattgtggttttcaatgcgttatccgcagcgtgacgctccagcgccagttcaatcaaacgtgtgatcagatcggtgtaacccagaccgctggcttgccacagcttcggatacatactgatattagtgaagccaggcagggtgttgatctcgttgatcaccacttcgttctctggggttaaaaacacgtctacacgcgccatgcctgcgcatcccaacgtttgataagcctgaacggcaatcgcccggatcttatcgttgatttctggcgcaatggctgccggaactaccactttcgcgccatcttcgtcaatgtacttggtgtcgtaggcatagaaatcgctggtgagtacgatctctccacaggtgctggcttgcggattgtcgttgcccagaactgcgcattcgatctcacgacctttgatcccttgctcaacgatcactttatgatcgaactcgaacgccagatcgacggcaattgcgtactgttcttcactggttactttgctgacaccaacagaagagccctgattagccggttttacaaacagtggtaaccccagtttagactccacttcggcaaaactaatgttgtgacgattggcgcgcgtcagggtaataaatggcgcaatgttcagcccggcatcgcgtagcagacgtttggtgacatctttgtccatacaggctgcactagccagaacatcagaacctacaaacggtaaattggcgacccgcagcattccctgcaaggaaccatcttcgcccagcgtaccgtggacaatcgggaaaatgacatccaccgtcggcaacggctgaccgttttgcgcgtcgataagctgatgctcatgtttacctggcacctgcgcaaggctggtcgcgctagggcgcaacgcaatatgggcaggatcgtctgcatttagcagataattgctggcatcgctgacgtgccattgcccttgtttatcaatgcccagcagcacaacgtcgaagcgacttttatcaatggcatcgacaatgttttttgcgctttgcagagacacttcatgttccgcacttttaccaccaaaaacgattcctacccgcagtttttccatcttaaaaacctatcccgtctaacacaaagtgcatacattaccacgacaaaacgggggattcgcggccttctgaaagattgttgcaatcttctgctgacaaagcgtgcaacgtactggtgaagaaagtgcgttatctcaaagatgtgcgcaagatcacaaaaatgatgaacgggaagctaatttattcctggcttaaatggccatgcggtgagtttttttctcttaattataagttaacgaagagaatatatttcataacttttatttataataaaggttgataattaaaagcctatattttgtgtgggtaattatttaaataagagaaacgtttcgctggtaatcaaacaaaaaatatttgcgcaaagtatttcctttgtcataaaaataatacttccagacactatgaagttgtgaaacataatgttaacttctccatactttggataaggaaatacagacatgaaaaatctcattgctgagttgttatttaagcttgcccaaaaagaagaagagagcaaagaactgtgtgcgcaggtagaagctttggagattatcgtcactgcaatgcttcgcaatatggcgcaaaatgaccaacagcggttgattgatcaggtagagggggcgctgtacgaggtaaagcccgatgccagcattcctgacgacgatacggagctgctgcgcgattacgtaaagaagttattgaagcatcctcgtcagtaaaaagttaatcttttcaacagctgtcataaagttgtcacggccgagacttatagtcgctttgtttttattttttaatgtatttgtacatggagaaaataaagtgaaacaaagcactattgcactggcactcttaccgttactgtttacccctgtgacaaaagcccggacaccagaaatgcctgttctggaaaaccgggctgctcagggcgatattactgcacccggcggtgctcgccgtttaacgggtgatcagactgccgctctgcgtgattctcttagcgataaacctgcaaaaaatattattttgctgattggcgatgggatgggggacagcgaaattactgccgcacgtaattatgccgaaggtgcgggcggcttttttaaaggtatagatgccttaccgcttaccgggcaatacactcactatgcgctgaataaaaaaaccggcaaaccggactacgtcaccgacagcgctgcaagtgcaaccgcctggagtaccggtgtcaaaacctataacggcgcgctgggcgtcgatattcacgaaaaagatcacccaacgattctggaaatggcaaaagccgcaggtctggcgaccggtaacgtttctaccgcagagttgcaggatgccacgcccgctgcgctggtggcacatgtgaccagccgcaaatgctacggtccgagcgcgaccagtgaaaaatgtccgggtaacgctctggaaaaaggcggaaaaggaagcattaccgaacagctgcttaacgctcgtgccgacgttacgcttggcggcggcgcaaaaacctttgctgaaacggcaaccgctggtgaatggcagggaaaaacgctgcgtgaacaggcacaggcgcgtggttatcagttggtgagcgatgctgccagtctgaatagcgtgacggaagcgaatcagcaaaaacccctgcttggcctgtttgctgacggcaatatgccagtgcgctggctaggaccgaaagcaacgtaccatggcaatatcgataagcccgcagtcacctgtacgccaaatccgcaacgtaatgacagtgtaccaaccctggcgcagatgaccgacaaagccattgaattgttgagtaaaaatgagaaaggctttttcctgcaagttgaaggtgcgagtatcgataaacaggatcatgctgcgaatccttgtgggcaaattggcgagacggtcgatctcgatgaagccgtacaacgggcgctggaattcgctaaaaaggagggtaacacgctggtcatagtcaccgctgatcacgcccacgccagccagattgttgcgccggataccaaagctccgggcctcacccaggcgctaaataccaaagatggcgcagtgatggtgatgagttacgggaactccgaagaggatagtcaagaacataccggcagtcagttgcgtattgcggcgtatggcccgcatgccgccaatgttgttggactgaccgaccagaccgatctcttctacaccatgaaagccgctctggggctgaaataaaaccgcgcccggcagtgaattttcgctgccgggtggtttttttgctgttagcaaccagacttaatggcagatcacgggcgcatacgctcatggttaaaacatgaagagggatggtgctatgaaaataacattactggttaccttgcttttcggtctggtttttttaaccaccgtcggcgctgccgagagaactttaaccccacaacaacagcgtatgacctcctgtaatcagcaggcgacggcgcaggcgttgaaaggggatgctcgtaagacctacatgagtgattgcctgaagaacagcaagtctgcgcctggcgaaaaaagtttgacgccacagcagcaaaagatgcgcgaatgcaataatcaagcaacacaacaatctctgaaaggtgatgatcgtaataagtttatgagtgcctgcctcaagaaagccgcctgatacctgatagtgctaacgggtgagctacgaaaatggctcacccgaaatatcatacttctgcctttagctccgtctctataatttgggaaaattgtttctgaatgttcccaaaaataatgaatgatgaaaactttttcaaaaaagcggcggcgcacggggaggaacctcctttaactcctcaaaacgaacatcagcggtccgggctgcgcttcgcccgtcgcgtcagactaccccgtgcggttggcctggctggcatgttcttaccgattgctagtacgctggttagtcacccgccgccgggctggtggtggctggtgttggtcggctgggcgttcgtctggccgcatttagcctggcagatagcgagcagggccgtcgatccgcttagccgggaaatttacaacttaaaaaccgatgcagtattagcgggaatgtgggtaggcgtaatgggcgtaaacgtgctgccttccaccgcgatgttgatgattatgtgtctgaatttgatgggggcaggcggcccccgtctgtttgtcgcgggtctggtgttgatggtggtttcctgccttgtcaccctcgagctgacgggcattaccgtgagcttcaatagtgcgccgctggaatggtggctctcccttcccattattgtcatttatcctctgctgtttggctgggtcagctaccagacggcaaccaaactggcggaacataaacgcaggttgcaggtcatgagtacccgcgacggcatgacgggcgtgtataaccgacgtcattgggaaactatgttacgcaatgaatttgataactgtcggcggcataatcgcgatgcaacgttactgattatcgatatcgaccatttcaagagcatcaacgatacctggggccatgatgtgggcgatgaagcgattgtggcgcttacccgacagttacaaattaccctgcgcggtagcgatgtgattggtcggtttggcggcgatgagtttgcagtaatcatgtccggtacgccagctgagagcgccattaccgccatgttacgggtgcatgaagggctaaatacattacgtttgccgaatacgccacaggtaactttacggattagtgtgggggttgcgccgctgaacccacaaatgagtcactatcgtgagtggttgaaaagcgcagatttggcgctttacaaagcaaagaaagccggacgtaaccgcaccgaagtggcggcctgacgtccggcgaaagtcatcaggatttgctgagtttttcacttttttccatacacttcgtcatcgcttcgatcactgcagcacggaagcctttctcttccagtacgcgtaccgcttcaatggtggtgcctcccggactgcagaccatatctttcagtgcccccggatgttctcccgtttccagcaccatttttgcggaacccattaccgcctgagcggcaaatttatacgcctgggcgcgtggcatcccgcccagcacggcggcgtcggccatcgcttcgataaacataaatacgtaggctgggctagaaccgctcacaccgaccaccgggtggatcatcggctcagcaattacttccgcttcgccaaagcagcggaaaatattcagcacatcagcggtatcttctggggttaccagcgcgtttggcgttacggaggtcatcccggcattaaccagtgcgggagtgttcggcatggcgcggataattttccggtcatggcccagcgcgcgggcaagctggtcgagcgtgacacctgcagcaatagaaacgaccagagagtctttattcaggctggaggtgatttcgctaagcactttaatcatgatgccaggtttaacggcagcaaaaatgatgtcggcgatttgcgccacttcttgcgcgctttctgcggcgttgatgccgaactggtcatgcagggcggcgactttatccggggagggggtgtatacccagatttgccctggaagcacctgaccgctggcaatcagaccgccgagaatggcttttcccatattgccgcagccaataaaaccgattttcttttccattgcctcactcctgccgtgaaattcattgttttgataatcgctggcagaagcataaacagaactatgccggaaggcaaaagcgcgacacaatagaggattacccaacaaaggatgactttatgacaatttgggtggatgccgacgcgtgtcccaatgtaattaaagagattttgtatcgcgcggcggaacgtatgcagatgccgctggtactggtagcaaaccagagtttacgcgtgccgccaagccgatttattcgtacgctgcgcgtcgcggcaggtttcgacgttgccgataacgaaattgtccggcagtgtgaagcgggcgatttggtgatcaccgcagatatacctttggctgctgaagccatcgagaaaggcgctgcggcgcttaatccgcgcggcgaacgttacacgccagcgaccattcgtgagcgcctgacgatgcgcgattttatggataccttacgtgccagtgggatccagaccggcggaccagatagccttagtcaacgtgaccgccaggcctttgccgcggagctggagaagtggtggctggaagtgcaacgtagtcgtggctaaatgtaatttattatttacacttcattcttgaatatttattggtatagtaaggggtgtattgagattttcactttaagtggaattttttctttacaatcgaaattgtactagtttgatggtatgatcgctattctcatgacaccggctttcgccgcattgcgacctattggggaaaacccacgatgacacaacctctttttctgatcgggcctcggggctgtggtaaaacaacggtcggaatggcccttgccgatagccttaaccgtcggtttgtcgataccgatcagtggttgcaaagtcagctcaatatgacggtcgcggagatcgtcgaaagggaagagtgggcgggatttcgcgccagagaaacggcggcgctggaagcggtaactgcgccatccaccgttatcgctacaggcggcggcattattctgacggaatttaatcgtcacttcatgcaaaataacgggatcgtggtttatttgtgtgcgccagtaagtgtcctggttaaccgactgcaagctgcaccggaagaagatttacggccaaccttaacgggaaaaccgctgagcgaagaagttcaggaagtgctggaagaacgcgatgcgctatatcgcgaagttgcgcatattatcatcgacgcaacaaacgaacccagccaggtgatttctgaaattcgcagcgccctggcacagacgatcaattgttgattttcgagcgcctatacttaacgttcatcccgtgaaataaggaagaacgatgccaacgaaaccgccttatcctcgtgaagcatatatagtgacgattgaaaaaggaaagccaggacagacggtaacctggtaccaactcagagccgatcatcctaaaccagacagcttgatcagtgaacatccgaccgctcaggaagcgatggatgcgaaaaaacgctatgaggaccctgacaaagagtgaccgcatcagactgctcggaagggattctgagtgccactacaagggatctgcgtcacatttttcataattcatgtttttctaataattagaatattaaacaataacaatccattactggaatcatttggaatctttacattatgccgtgcacgtctgctgctacgctttttgtcatttgtagcacaagtaagtgtcagcagtggtgcttcacacttgcccggtaattaacgacgaaagaaaagtaaggtggatgaacaatgagtgcgagcttggcgatcctgaccatcggcattgtacctatgcaggaagttttgccgctcctgacggaatacattgacgaagataatatttcccatcatagcctgctggggaagttaagtcgtgaagaagtgatggcggagtacgcgccagaagcaggcgaagacaccattctcacattattaaatgacaaccagctggcccatgttagccgtcgcaaagtggagcgtgacctgcaaggtgtggttgaagtgctcgataatcagggttatgacgtcattttattaatgagtacagcaaacattagtagtatgactgcgcgtaatacgatctttcttgagccgagccgaatattgcctccactggtttcctctattgttgaagatcatcaggtgggggttatcgttccggttgaggagatgctgcccgttcaggcgcaaaaatggcaaattttgcagaaaagcccggtatttagtttgggtaaccccattcatgatagtgaacaaaaaatcattgatgccgggaaagaattactggcaaaaggggctgatgtcatcatgctggattgtttaggatttcaccaacgtcatcgcgatttactgcaaaaacagctcgatgttcctgtcttgctgtctaacgtattgattgcacggctggctgcggaattactggtgtaattttgcgtgacagccagcgcctctggcccctatagtgaagtagatgttcaactaccaaacagggccagtttatgcttcaaagtaatgagtacttttccggcaaagtgaaaagtatcggcttttccagcagcagcactggtcgcgccagcgtgggtgttatggttgaaggcgaatacaccttcagcaccgctgagccggaagagatgacggtaatcagtggcgcgctgaatgtgttactgcctgacgcgaccgactggcaggtgtatgaagccggtagcgtgtttaatgttcccggtcacagtgagtttcatctgcaagttgccgaacccacctcttatctgtgccgctatctgtaattcctcgccttccccttgaacgggagggcatttttctgaaatatcctttctttagcccataataatatttcctttgctgcgattttttcaatttccgatatattcataatttatcaaggttgatataaatatcagtgaagatctccagatattgttgcggaactggctacgataaaagataaatcagatgatgaatggtggcgtgcattgctgcaaagtcgcaatgatcatttacgccaaacggcattgcgcaacgcacataccccggcgttgttgttaacgacattgactgagcctcaggatcggagcctggctattaataatccacagctggctgccgatgtgaaaacggcgtggttaaaagaggatccaagtttactcttatttgtcgaacaacccgatcttagcctgttacgtgatttagtgaaaaccggggcaacgcggaaaattcgcagtgaagcgcgtcaccggcttgaggaaaaacaatgacacaacgtccatggagcaagttacagcgtaaaacgcataatattgctgcgctaaaaattattgctcgccgtagcgaataattatatgcctggtgtggcttcgtacgccggataagacgcggcaggcgtcgcatccggcattaaaggaaaatcagcaattaacgttgtgcttcgccacctaatccttcaatcaggttttgaattaacgctgccagttcaccagtcatcaggatgaaatcggcatcaaaacgctgggcgaaatcttcacggtcgatatcttcgttttgatcgcgcagctcgtcgcagaacttcagacgcttgaggctaccatcgtcgcacatcacaaactgaatgcgctgctgccagtcgagcgccagtttagtcaccacttttccggcttcaatgtgattggtgatctcttcgctggtcagatcttgtttcttcgcgcggatcacgccgccatcttccagcaagcttttcagctcggcttcatcaagcagctggaagccctgtgccgcactaccggagcgaacccattcggtcagcgtcagttcaatcgggttttccatgctcaatggtacaaccggtaagctccccaggcttttacgcagtaatgccagcgtatcttccgcttttttggcactggcgcagtccaccataatcaaaccgttaaccgtgtcgatccacatcattgtctggctaaaacggctgaaagcacgcggcagcagagagtgcagcacttcgtctttcaggctatctttttcggttttcttcagcttacgcgcctgttccgcttccagtttggcgattttcgcttccagcgcctgtttaatcaccggagacgggaggattttttcttctttgcgcgcgcagataacaatttgaccattggcaacgtgcgttaacgcatcgctgtggcttcccatcggaggaacccagcccatcttcgccatgtcctggctgccgcatggggtaaatgccatgctggctagctgtttttccatctcttctgcacgcaggctaatctcgcggctaagacggtaaaccattaaatttttgaaccacagcatgataatttccacggccttgtcgttaaatttagcgggcatgataacgaattgtcggcggccttgcattgccaatccggttgtccgtctctacgctattgatattgaaaaaaataaggagagtaccgtgcgtataggtatcgatttaggcggcaccaaaactgaagtgattgcactgggcgatgcaggggagcagttgtaccgccatcgtctgcccacgccgcgtgatgattaccggcagactattgaaacgatcgccacgttggttgatatggcggagcaggcgacggggcagcgcggaacggtaggtatgggcattcctggcagtattagcccttacaccggtgtggtgaagaatgccaatagtacctggctcaacggtcagccattcgataaagacttaagcgcgaggttgcagcgggaagtgcggctggcaaatgacgctaactgtctggcggttagtgaagcagtagatggcgcggcagcgggagcgcagacggtatttgccgtgattatcggcacgggatgcggcgcgggcgtggcattcaatgggcgggcgcatatcggcggcaatggcacggcaggtgagtggggacacaatccgctaccgtggatggacgaagacgaactgcgttatcgcgaggaagtcccttgttattgcggtaaacaaggttgtattgaaacctttattagcggcacgggattcgcgatggattatcgtcgtttgagcggacatgcgctgaaaggcagtgaaattatccgcctggttgaagaaagcgatccggtagcggaactggcattgcgtcgctacgagctgcggctggcaaaaagcctggcacatgtcgtgaatattctcgatccggatgtgattgtcctggggggcgggatgagcaatgtagaccgtttatatcaaacggttgggcagttgattaaacaatttgtcttcggcggcgaatgtgaaacgccggtgcgtaaggcgaagcacggtgattccagcggcgtacgcggcgctgcgtggttatggccacaagagtaaaaaacgtaggcaattggcgcatcatgcctgatgcgacgcttgccgcgtcttatcaggcctacaaaaggtgccagaaccgtaggccggataaggcgttcacgccgcatccggcaataagtgctccgatgcctgatgcgacgcttgccgcgtcttatcaggcctgcaaaatgtgccagaaccgcgtagggcggataaggcgttcacgccgcatccggcaataagtaatgagcaccgagactataacttaccccagtggtttcgccagcaccggagtatccgccgcttgctggcgcttatagcgaccatacagcagcaagctgctcatcgcagcaaagctaagcagggcggcaggcagcgccacgtaattatatgccagccccagcgtcagcatcatacctccgcaatatgcgccgacggcgctaccgaggttaaacgctatttgcccacctgcggcacctaataactctccgcctttggcgttttgtagtaacaatatttgtagcggtgcactaagggcaaataatcccgcgcaacaaataaaagcaaaaataaggctcgttgttttcatgccgccgcagaaaaagagcatcagcagtgccagtacaattataaagtcagttactgctgcaatgcgcagtggactataacgtccactaatcctgccacttagcatatttcccagcaccatccctagcccaactaacatcataataaaggtcatcgccgtttcgctaaaaccggaaataaacatcatgtatggctttacgtagctgaaccaggcaaacacacctgcgttgccaaacatcgtggcggcgaaaattaaccacggggccgggctgcgcaaaaagtgaaattgttcgcgcagatttcctttcgcctcgtcgcgaatatctggcacccaaaaatagacgcttgccatcaccgcaatattaaaaacagcgatcaataaaaaggtgtaacgccagctaaattcctgacttaaatacgttcccagcggaatgcccagcaaattggcgactgtcatcccggaaaccatccccgccacggcggcggtgacttttccgggtttgataattttacttaacacgatcgctccgacgccaaaaaatgcgccatgcggaaagccggataccagccgaccaatggcgagcatcaggtaagagctagagagcgtgaacatggcgttgccaatgacgcacaacgccaccagaaacaacaagatatgtttgagactgtagcggctggaaaagagtgcgatgattggcgcaccgaccaccacccccagtgcataatagctgatcatatgcccggcggcaggaatgctaattcctacgttatgcgccagctccgtgagcacgcccataatgccaaattcggccatccccaaaccaaacgtgcccagagccaaagataaaatgacttttttcataccaccatcacaaccaccagaacggctaccaatcaccgtagccaataaagtgatagcttgcaggataacgaccagcaaggccaagagataattcgcccctctgtattcattatcctgctgaatagttatttcactgcaaacgtactttccagtttgctgtagcccaggccgttgatctttttcactttgatctgcaccggaatacgctctttcatcgcttctacgtggctaatcacaccgatggttttgccactggcgttcagggcatccagcgcatcaagggcggtatccagcgtttcgctatccagcgtgccaaaaccttcatcaaggaacaggctgtcaatacgtgttttatggctgaccagatcgctaagcgccagcgccagcgccagactaacgaggaaactttcgccgccggaaagggtacgggtatcgcgtaccgcatctgcctgccaggtatcaacaacctcgacttccagcgcctcgctggctttgcgctgtaacagatagcgcccgtgcagccgggtaagttgctgattagcgagatggactaaattatccagcgtcagcccctgggcaaacttgcggaatttatcgccctctttggaacctattaggctattcagatatccccagtcctcaacctgctgcgtcatttgagcaatttgctgcattaaggtttgttgttgctgacggttatctgcatcctgcttcagctgctggcgaatctcgccttgactcgtggtgttttcacgcaacttttggtgagtttgcgctaactcttgctgaatctgctccaccgtcacagtgagagccaacccgtcgtcaggtcggtgttgttgatgctgtgccagcgtttctgctgtctgagtgaccagagtttgcgcctgacggcgctggttttccagattctgcttgagctgttccagctgcgttagtgtttgttcatccattagcgccgcaaggaacgcctgctgatcgtcaaagacgctggcctgtagcgcggtgtcaaactgcgcctgggctttttgcagactttgcgccgccagaacatcctgttgctgtaacgtctgctgctggctgtgtaatgcgagacattgttcatgtacctgccgccagttttccaataccacagtttcttcgcagtgcgggagttcatcactttgcggcaacgtttccagaatcggcgtcagctgctgaatacggttttgcagcgcggttaattcgttctggcgttgctgccagctctgcgcttcttgctgacgtgtcgccaaccagctctcttcttcatcttcctgtggcaatgtcagtgcataacccgtcaatgtcgttaaaagtagttgctggcgttgttcaatttgctgttgatactggataatttgctgattatgcgcggcaatctgcccttgtaattcatgccgttggctgagtaaccgcagctggcgttcgtgctcatcttgtgcatccagccacggttgaatatcgtccagtggctgcaaggtgatattgaggctggccgtgacggcttgccattgttgagtaagtgcttgctcatcttgtcggaggctttgcgcttcgttttcatcacgctgaagctgctttgttatggcgtccagttgcccacgtagcgtcgcaccttcttcaccgagctttttaacttcgttttccagcgccagtaatcgagactgattaacgccaggctccagcgcctgatacgcctcgaccgccgggtggctggtggaaccacaaagtgggcaaggctgacccgcctgtaactgtgcacgttgagcttccagcgttttgatgcgcgcttcctgctcgcaaatggttttcacatcggcaagttgctgcgtcttttctttataacgctggcgcatttcgttaagtgcggcgttacgttgcgtctgttcttgcgtgacattctggatagcgacctgtaactgcgccagacgtttttgttggggaacaatctgtccatgcagcgcgaccaggtgctgacgcagtgggcgttgctcagcatgttgcgccagggcggtagcaacttcatcggcggttaacgtcaacgtgatcgccgcaagcgcattaagtttttgctcagcatgggttaactgttgctgccattgccgcagatgctcgcgatcgctggtttgttgggagaactgcgcacgccaacccgccggttcgttgttccactgacggaagcggtcgtgttcctgtaaccaggtattcaggctttgttgctgctgctgtaattctgcactctgcttcgccgcgtggtggcgaatgctcgcgcgaagcgccattgtgctctgtaagcgagtatttacttcttcaatctgctggcgaatatgcgccagcgccgcgctgtgttctgcgatgcgttcccagtgtggacgaagatttcgtgccggttgtgccagactaagcgccgccagttgaggttgcgctttttcttcttcggctaacgcctgttgcaaggcctgctgacggcggctggcttcttgctgcaattcgtcctgacgcgttaaccagtttaggctttgttgttcttgctgctgcgcggtaattaactgtttttcttcgtcagtaagtacctgcaaactcgctgtcaggctttgcacttgttccggcgtgagcaacgtgacgccgctggcctgcgcttgcagcttctccagctctgtgcgggcgcttttgtgctgctcaaaaaccatcgcgctgatttgcccgtagatttcagtgccggttaactcctcgagcaattccgcgcgttctttgggtttggcattcaggaaggcagcaaattgcccctggctaagcagcatgctacgggtgaagcgcccgtaatccagcccggttaacgtcgctgtcagttccagcttatctttcactttgtcggcgagaattttgccgtcggcgcagcgcgccagctctacgcgtggcacctgcaaattaccgtcgggttggttacgcgcccgattctggctccagaatgcacggtacgcttcacctttcacttcaaactccacctccgccagacattcggcggtatcgcgggtcatgagatcattttggctttgactaacgttagagagacgcggagtttcgtgatacagcgccagacaaatggcgtccagcagggtggttttccccgcacctgttgggccggtaatagcaaacagcccgttgctggcgaacggctcgcgggtgaaatcaatcttccattcgccttttaaactgttcaggtttttcaggcgcaggctgagaattttcatgcttcgtgttctccggcgagggtatgcaacgtcgtggtgaaaagatgctgcagacgttgctgctggctttcatccagttcttccagtgccagacggcgattgaacacctcttcgacgctgagttcgctgagggtttcacgctgttggctggctaacacacgctcgcgctgttcacgactccgacgtaccagcaatacttcgacaggcaaactttcggttaatgcctggattttgcgctgaatatcatgcagatactcatcagtagtgatttcgatatccagccagacaggtggctcctggcttacatcgcgccactgttccagctgtgcggtaatgctcgccagatcgcctttcagcactgccatgggttgcgttaccggtacgttcaggttttccacgctctctaatttgccgttactaaatgtcaccagatggacatatttactcttaccgcattcatcaaaactcagtggaatgggggagccgcaatagcgaacatgttccatgccgccaataatctgtgcgcggtgaatatgcccgagcgcgatgtagtcggctggtggaaagttttgtgccggaaacgcgtccagcgtgccaatataaatgtcacgcacggcgtcacttttactggcccccacggtcgttaaatgtcccgtggcgatgatgggcagaggctgatcgccgcgcagtttgcaggcatcggcatagtgttgttggtaataatcggtaatcgctgccagtaaatgctgctgtttttcaataccgttaagccccgcctggctggtaataatgtcacgcggacgtaaaaacggaatggggcacagcactgcgcctggcgtcccgtcgcgacgaggcaagatttgcggcgcatgtccggcgctggcgaccacggtagtattgaggaacgccatgatatcgcggctttcattcagcgtggcgacgctgtcatggtttcctgccagtaccaccagatgacagccagtttgctgtaaattgacaacaaaacggttgtataacgtgcgggcgtaactgggcgggctgccggtatcgaaaacatcaccggcaacaataatcgcatccacctgatgggtttgtgctgtctccagcagccagtcaagaaaagcctgatgttcagcttcgcggcttttactgtagaagttctggccgagatgccagtcactggtgtgaaggatgcgcataacggttccctggcgaaaaagcatgggcgcgattatacccaaacagatgtgccatttgcttttttctgcgccacggaaatcaataacctgaagatatgtgcgacgagcttttcataaatctgtcataaatctgacgcataatgacgtcgcattaatgatcgcaacctatttattacaacagggcaaatcatggcgagacgtattctggtcgtagaagatgaagctccaattcgcgaaatggtctgcttcgtgctcgaacaaaatggctttcagccggtcgaagcggaagattatgacagtgctgtgaatcaactgaatgaaccctggccggatttaattctcctcgactggatgttacctggcggctccggtatccagttcatcaaacacctcaagcgcgagagcatgacccgggatattccagtggtgatgttgaccgccagaggggaagaagaagatcgcgtgcgcggccttgaaaccggcgcggatgactatatcaccaagccgtttagcccgaaggagctggtggcgcgaatcaaagcggtaatgcgccgtattagcccaatggcggtggaagaggtgattgagatgcagggattaagtctcgacccgacatctcaccgagtgatggcgggcgaagagccgctggagatggggccgacagaatttaaactgctgcacttttttatgacgcatcctgagcgcgtgtacagccgcgagcagctgttaaaccacgtctggggaactaacgtgtatgtggaagaccgcacggtcgatgtccacattcgtcgcctgcgtaaagcactggagcccggcgggcatgaccgcatggtgcagaccgtgcgcggtacaggatatcgttttagtacccgcttttaacgccttgctcatcggacgcagagcagggcttatgatttcttaactggagtatcttacgtgctggaacggctgagctggaaaaggctggtgctggagctgctactttgctgcctcccggctttcatcctgggtgcattttttggttacctgccctggtttttgctggcaagcgtaacaggactgcttatctggcatttctggaatttattgcgccttagttggtggctgtgggtggatcgcagtatgaccccgccaccggggcgtggtagctgggaaccgctactatacggcttacaccagatgcagctgcgaaataaaaaacgccgccgtgaactgggcaatctgattaaacgctttcgtagcggcgcggagagcctgcccgacgcggtggtgctgaccacggaagagggcggtattttctggtgtaacggtctggcgcaacaaattcttggtttgcgctggccggaagataacgggcagaacatccttaacctactgcgttacccggagtttacgcaatatctgaaaacgcgtgatttttctcgcccgctcaatctggtgctcaacaccgggcggcatctggaaattcgcgtcatgccttatacccacaaacagttgctgatggtggcgcgtgatgtcacgcaaatgcatcaactggaaggggcgcggcgtaacttttttgccaacgtgagccatgagttacgtacgccattgaccgtgttacagggttacctggagatgatgaatgagcagccgctggaaggcgcggtacgcgaaaaagcgttgcacaccatgcgcgagcagacccagcggatggaaggactggtgaagcaattgctgacgctgagcaaaatagaagccgcaccgacgcatttgctcaatgaaaaggttgatgtgccgatgatgctgcgcgttgttgagcgcgaggctcagactctgagtcagaaaaaacagacatttacctttgagatagataacggcctcaaggtgtctggcaacgaagatcagctacgcagtgcgattagcaacctggtctataacgccgtgaatcatacgccggaaggcacgcatatcaccgtacgctggcagcgagtgccgcacggtgccgaatttagcgttgaagataacggaccgggcattgcaccggagcatattccgcgcctgaccgagcgtttttatcgcgttgataaagcgcgttcccggcaaaccggcggtagcggattagggttagcgatcgtgaaacatgctgtgaatcatcacgaaagtcgcctgaatattgagagtacagtaggaaaaggaacacgtttcagttttgttatcccggaacgtttaattgccaaaaacagcgattaatccgcctttgtcatcttttattgccataagccagtcgatgctggcttattttctttgcagtcaaaatacgggcgttagattttacaacgattggtgattttttgttcgcatgattagccatgtctttttcacggaaatagtgttttatactggttggtgatttcttatcgctatatacctctggtttttagatccctccttgctttaaaacgttataagcgtttaaattgcgcttcaggtgctgtcatactgactgcattaacgcggtaaatcgaaaaactattcttcgccgcgcctggttgggagtatttcccgctaaaattgtttaaatataccgctgtatcatccccagggattggcacaaaaatttaacgttacaacaccacatccacaggcagtatgatttatgacccatcaattaagaagccgcgatatcatcgctctgggctttatgacatttgcgttgttcgtcggcgcaggtaacattattttccctccaatggtcggcttacaggcaggcgaacacgtctggactgcggcattcggcttcctcattactgccgttggcctgccggtattaacggtagtggcgctggcaaaagttggcggcggtgttgacagcctcagcacgccaatcggtaaagtcgctggcgtactgctggcaacggtttgttacctggcggtggggccgcttttcgctacgccgcgtacagctaccgtttcctttgaagtggggattgcgccgctgacgggtgattccgcgctgccgctgtttatctacagcctggtctatttcgctatcgttattctggttagcctctatccgggcaagctgctggataccgtgggcaacttccttgcgccgctgaaaattatcgcgctggtcatcctgtctgttgccgctattgtctggccggcgggttctatcagcacggcgactgaggcttatcaaaacgctgcgttttctaacggcttcgttaacggctatctgaccatggatacgctgggcgcaatggtgtttggtatcgttattgttaacgcggcgcgttctcgtggcgttaccgaagcgcgtctgctgacccgttataccgtctgggctggcctgatggcgggtgttggtctgactctgctgtacctggcgctgttccgtctggggagtgacagcgcgagcctggtcgatcagtctgcaaacggcgctgctattctgcatgcttacgttcagcacacctttggcggcggcggtagcttcctgctggcggcgttaatcttcatcgcctgcctggtaacggcagttggcctgacctgtgcttgtgcagaattctttgcccagtacgtaccgctctcttatcgtacgctggtgtttatcctcggcggcttcagcatggtggtttctaacctcggcttaagccagctgatccagatctccgtaccggtgctgaccgctatttatccgccgtgtatcgcactggttgtattaagttttacacgcagttggtggcataatagctcccgcgtgattgctccgccgatgtttatcagcctgctttttggtattctcgacgggatcaaagcatctgcattcagcgatatcttaccgtcctgggcgcagcgtttaccgctggccgaacaaggtctggcgtggttaatgccaacagtggtgatggtggttctggccattatctgggatcgcgcggcaggtcgtcaggtgacctccagcgctcactaaatcactgaacatttgttttaaccacggggctgcgatgccccgtggttttttattgtgttgatgggttaggaattgatggaaagtaagaacaagctaaagcgtgggctaagtacccgccacatacgctttatggcactgggtagtgcaattggcaccgggctgttttacggtagcgcagacgccatcaaaatggccggtccgagcgtgttgttggcctatattatcggtggtatcgcggcgtatatcattatgcgtgcgctgggggaaatgagcgtacataacccggccgccagctctttcagccgttatgcgcaggaaaacctcggcccgctggcaggttacattaccggctggacctactgctttgaaatccttattgtcgccatcgccgatgtgaccgcttttggtatctatatgggtgtctggttcccgacggtgccgcactggatttgggtactgagcgtggtgctgatcatttgcgccgtaaacctgatgagcgtgaaggtattcggtgagctggaattctggttcagcttctttaaagtcgccaccatcatcatcatgattgtcgccggtttcggcatcatcatctgggggattggcaacggcgggcaaccgaccggtattcataacctgtggagcaacggcggcttcttcagtaacggctggcttggcatggtaatgagcttgcaaatggtgatgtttgcttacggtgggatcgaaattatcgggattaccgccggtgaagcgaaagatcctgagaaaagcataccgcgtgcgattaactccgtgccgatgcgtattctggtgttctacgtcggtacgctgttcgtcattatgtctatctacccgtggaatcaggttggcactgccggtagcccgttcgtgctgacgttccagcatatgggcattacctttgccgccagcattcttaactttgttgtgctgactgctagcctgagcgcaattaacagtgatgtatttggcgtaggccgtatgctccacggtatggcagagcagggcagcgcgccgaaaattttcagcaaaacgagccgtcgcggtattccgtgggttacggtgctggtgatgactaccgcgctgctgtttgcggtgtatctgaactacatcatgccggaaaacgtcttcctggtgatcgctagcctggcaaccttcgccacggtgtgggtgtggattatgatcctgctgagccaaattgccttccgtcgccgtttgccgccagaagaagttaaggcgctgaaatttaaagtgccgggtggggtagcaacgaccatcggcgggctgattttcctgctctttattatcgggttgattggttatcacccggatacgcgtatcagcctgtatgtcggtttcgcgtggattgttgtgctgttgattggctggatgtttaaacgccgccacgatcgtcagctggctgaaaaccagtaatccttgcgttctgtaagccggttcaggaggaaatcctgatccggctattccgaaagttatccgcccccgtcctcctcccccaaatatccttcagatgatgagtgatcctgcattaggctatggcaaggtgatcagattttcatcacaggggaattatgatgttaaatgcatggcacctgccggtgcccccatttgttaaacaaagcaaagatcaactgctcattacactgtggctgacgggcgaagacccaccgcagcgcattatgctgcgtacagaacacgataacgaagaaatgagtgtaccgatgcataagcagcgcagtcagccgcagcctggcgtcaccgcatggcgtgcggcgattgatctctccagcggacaaccccggcggcgttacagtttcaaactgctgtggcacgatcgccagcgttggtttacaccgcagggcttcagccgaatgccgccggcacgactggagcagtttgccgtcgatgtaccggatatcggcccacaatgggctgcggatcagattttttatcagatcttccctgatcgttttgcgcgtagtcttcctcgtgaagctgaacaggatcatgtctattaccatcatgcagccggacaagagatcatcttgcgtgactgggatgaaccggtcacggcgcaggcgggcggaagtacgttctatggcggcgatctggacgggataagcgaaaaactgccgtatctgaaaaagcttggcgtgacagcgctgtatctcaatccggtgtttaaagctcccagcgtacataaatacgataccgaggattatcgccatgtcgatccgcagtttggcggtgatggggcgttgctgcgtttgcgacacaatacgcagcagctgggaatgcggctggtgctggacggcgtgtttaaccacagtggcgattcccatgcctggtttgacaggcataatcgtggcacgggtggtgcttgtcacaaccccgaaagcccctggcgcgactggtacagctttagtgatgatggcacggcgctcgactggcttggctatgccagcttgccgaagctggattatcagagcgaaagtctggtgaatgaaatttatcgcggggaagacagtattgtccgccactggctgaaagcgccgtggaatatggacggctggcggctggatgtggtgcatatgctgggggaggcgggtggggcgcgcaataatatgcagcacgttgccgggatcaccgaagcggcgaaagaaacccagccggaagcgtatattgtcggcgaacattttggcgatgcacggcaatggttacaggccgatgtggaagatgccgccatgaactatcgtggcttcacattcccgttgtggggatttcttgccaataccgatatctcttacgatccgcagcaaattgatgcccaaacctgtatggcctggatggataattaccgcgcagggctttctcatcaacaacaattacgtatgtttaatcagctcgacagccacgatactgcgcgatttaaaacgctgctcggtcgggatattgcgcgcctgccgctggcggtggtctggctgttcacctggcctggtgtaccgtgcatttattacggtgatgaagtaggactggatggcaaaaacgatccgttttgccgtaaaccgttcccctggcaggtggaaaagcaggatacggcgttattcgcgctgtaccagcgaatgattgcgctgcgtaagaaaagtcaggcgctacgtcatggcggctgtcaggtgctgtatgcggaagataacgtggtggtatttgtccgcgtgctgaatcagcaacgtgtactggtggcaatcaaccgtggcgaggcctgtgaagtggtgctacccgcgagtccgtttctcaatgccgtgcaatggcaatgcaaagaagggcatgggcaactgactgacgggattctggctttgcctgccattagcgctacggtatggatgaactaacgttttataacgccttgcgactcgcctgcgccatcatccgcggataaaactgccagaagcgggtttcgagggcgtcataatgagcgtctaaatcgtaccaggagtcacgcagggcatccagacgtgggcggcggcttgccatgccgtttaacacgttctggatgaaatccatatcgcgatagcgcaccagccactgctcactccacaagtaattgttcagattgataaaacgtggcggactgtccggcaaaatcgtcatcacttgctcgcgggcataacagacaaattcctgtagcggaaagtccgggctcagctggctccagtggcgggaaagaaagtgatcccacatgacatccagcgtaataggcgcaacgcggcgcgtttcactacgaaaccactcccgtgcttcgcggacttccggcagattgtcagtcaatacgtcgatacgtcgatgcatatgaatgccagccacgacgtcgggcggaaaactttcttcaggatttccgcgtacgaaatcagccagtaaattgccggaaaggctgctttccgcgagatgggctaaatgcaggtgagctaaaaaattcatcgattatattctatccaaaagggggtaaaggttgcagggagagcgccccggcactagactacccgcctcttattttagtctgagtcagtgtcatgcgcgttaccgatttctcctttgaattgcccgaatccctgattgcccactatcccatgcctgaacgcagtagctgtcgtttactgagcctggacgggccgacgggcgcgctgacgcacggtactttcaccgatttacttgataagctcaaccccggcgatcttctggtttttaataatacccgcgtgatcccggcgcgcctgtttgggcgtaaagccagcggcggcaagattgaagtgctggttgaacggatgctcgacgacaaacgcattcttgcgcatattcgcgccagcaaagcgccaaaacctggcgcagaactgctgctgggcgatgacgaaagtattaacgcaacaatgaccgcgcgccacggcgcactgtttgaagtcgaatttaatgatgaacgcagcgtgctggatattctcaacagcatcggccatatgccgctgccgccgtatatcgaccgtccggacgaagacgctgaccgcgaactttatcaaaccgtttatagcgaaaaaccgggcgcggttgcagccccgaccgcaggtctgcattttgacgagcctttgctggaaaaattgcgcgccaaaggcgtggagatggcgtttgtgacgttgcacgttggtgcgggcaccttccagccggtgcgcgtcgacaccattgaagatcacatcatgcacagcgaatacgctgaagtaccgcaggatgtggtagacgcggtactggcggcgaaagcgcgcggtaaccgggtgattgcggttggcaccactagtgtacgtagcctggaaagcgcggctcaggcagcgaaaaacgatctcattgaaccgttcttcgacgatacccaaatctttatctatccgggcttccagtacaaagtggtcgatgcgctggtgacgaacttccacttgccagagagcacgctgattatgctggttagcgcctttgccggttatcaacacaccatgaacgcctataaagcagcggtagaagagaaatatcgcttttttagttacggtgatgcgatgtttatcacgtacaatccgcaggcaattaatgagcgcgtcggggagtaattccgcggcgctggtttaaaacgttggactgtttttctgacgtagtggagaaaaaatgaaatttgaactggacaccaccgacggtcgcgcacgccgtggccgcctggtctttgatcgtggcgtagtggaaacgccttgttttatgcctgttggcacctacggcaccgtaaaagggatgacgccggaagaagttgaagccactggcgcgcaaattatcctcggcaacaccttccacctgtggctgcgcccgggccaggaaatcatgaaactgcacggcgatctgcacgattttatgcagtggaaggggccgatcctcaccgactccggcggcttccaggtcttcagccttggcgatattcgtaaaatcaccgaacagggcgtgcacttccgtaacccgatcaacggcgatccgattttcctcgatcctgaaaaaagtatggagattcagtacgatcttggtagcgatatcgtcatgatctttgatgagtgtacgccgtatcctgctgactgggattacgcaaaacgctccatggagatgtctctgcgttgggcgaagcgtagccgtgagcgttttgacagtctcggaaacaaaaatgcgctgtttggtatcatccagggcagcgtttacgaagatttacgtgatatttctgttaaaggtctggtagatatcggttttgatggctacgctgtcggcggtctggctgtgggtgagccgaaagcagatatgcaccgcattctggagcatgtatgcccgcaaattccggcagacaaaccgcgttacctgatgggcgttggtaaaccagaagacctggttgaaggcgtacgtcgtggtatcgatatgtttgactgcgtaatgccaacccgcaacgcccgaaatggtcatttgttcgtgaccgatggcgtggtgaaaatccgcaatgcgaagtataagagcgatactggcccactcgatcctgagtgtgattgctacacctgtcgcaattatagtcgcgcttacttgcatcatcttgaccgttgcaacgaaatattaggcgcgcgactcaacaccattcataaccttcgttactaccagcgtttgatggcgggtttacgcaaggctattgaagagggtaaattagagagcttcgtaactgatttttaccagcgtcaggggcgagaagtaccacctttgaacgttgattaatattaataatgagggaaatttaatgagcttttttatttctgatgcggtagcggcaacgggtgcaccggcgcaaggtagcccgatgtctttgattttgatgctggtggtattcggtctgattttctatttcatgatcctgcgtccacagcagaagcgcaccaaagaacacaaaaagctgatggactccattgccaaaggtgatgaagttctgacgaacggtggcctggttggtcgcgtaaccaaagtagcggaaaacggctacattgctatcgcgctgaatgacaccactgaagtagttattaaacgtgacttcgtagctgccgtcctgccgaaaggcaccatgaaggcgctgtaattaaaatttttccctaagggaattgccgtgttaaaccgttatcctttgtggaagtacgtcatgctgatcgtggtgattgtcatcggtctgctgtatgcgcttcccaacctgtttggtgaggatccggctgttcagatcactggtgcgcgcggagtcgccgccagtgagcaaacgctgatccaggtccagaaaacgttacaagaagaaaaaataactgctaagtctgtggcactggaagagggcgctattcttgcgcgcttcgactccactgacacccagttgcgcgctcgtgaagcattaatgggcgttatgggtgacaaatacgtcgtggcgcttaaccttgccccggcaacgccgcgctggctggcagctattcacgctgagccgatgaagctcggccttgacctgcgtggcggcgttcacttcctgatggaagtggatatggacaccgcgcttggcaaactccaggaacaaaatatcgatagcctacgcagtgacctgcgcgaaaagggcatcccgtataccactgttcgtaaagaaaacaactacggcctgagcatcactttccgcgatgctaaagctcgtgatgaagccattgcgtatctgagcaagcgccatccggacctggtgattagcagccagggcagcaaccagctgcgtgcggtaatgagcgatgctcgtctgagtgaagcgcgtgaatatgcggtgcagcagaacattaatatcctgcgtaaccgtgtaaaccaacttggcgtggcggagccggtggttcagcgtcagggtgctgaccgtatcgttgttgaactgccaggtattcaggacactgcgcgtgcgaaagagattctgggtgcgacggcaacgctggaattccgtctggtaaacaccaacgttgaccaggccgctgcggcatccggtcgcgtaccgggcgactctgaagtgaaacagacccgcgaaggtcagccagttgtgctgtacaaacgcgtaattctgaccggtgaccatatcaccgactccacttccagccaggacgaatacaaccaaccgcaggttaacatcagcctcgatagcgctggtggtaacatcatgtctaacttcactaaggacaacatcggcaaaccgatggcaaccctgtttgtggagtacaaagacagcggtaagaaagatgcaaatggtcgtgcggttctggtgaaacaggaagaggtgattaacatcgccaacatccagtctcgtctgggtaacagcttccgtatcaccggcatcaacaacccgaacgaagcccgtcagctgagtctgctgctgcgtgccggtgcgttgatcgcgccgattcagattgttgaagaacgtaccattggcccaaccctgggtatgcagaacattgaacaggggctggaggcttgccttgccggtctgctggtttctattctgttcatgatcatcttctataagaagtttggtctgattgcgaccagtgctctgattgccaacttgatcttaatcgtcggcattatgagcctgttgccaggcgcaacgctgagtatgccaggtatcgcgggtatcgtcttaacccttgcggtggcggtcgatgcgaacgtactgatcaacgaacgtattaaagaagagttgagcaacggacgtactgttcaacaggcaattgatgaaggttatcgtggcgcattcagttctatcttcgatgcgaacatcaccacgctgattaaagtcatcatcctgtacgcagtgggtaccggggcaattaaagggttcgcgattactaccggtatcggtgtggcgacgagcatgtttaccgcgattgtcggtacgcgtgccatcgtaaacctgctatatggcggcaagcgcgtcaagaagctgagtatctgaggagtgcgatgtggcacaggaatatactgttgaacaactaaaccacggccgtaaagtctatgactttatgcgctgggactactgggctttcggcatctctggtctgctgttaatcgctgctatcgttattatgggcgtgcgcggctttaactgggggctggatttcaccggtggtacggttattgaaattacgctcgaaaaaccggctgaaattgacgtaatgcgtgatgcattgcaaaaagccggttttgaagagccgatgctgcaaaactttggtagcagccatgacatcatggtccgtatgccgcctgctgaaggcgaaaccggcggtcaggtgttgggcagccaggttctgaaggtgattaacgaatccaccaatcagaatgcagcagtgaagcgtattgagttcgtcggtccgagcgtgggggcagaccttgcgcaaaccggtgcgatggcgttgatggcagcgctgctgtctatcctcgtgtacgtaggtttccgctttgagtggcgactggcggcaggggtggttattgcgctggcgcacgacgttatcattacgctgggtattttgagcttattccatatcgagattgacctgaccattgtggcaagcttgatgagcgttatcggttacagccttaacgacagtatcgtggtaagcgaccgtattcgtgaaaacttccgcaagatccgtcgcggtacgccttacgaaatctttaacgtgtccttgacccagacgctgcaccgtaccttgatcacatccggtactaccttgatggttatcctgatgctgtacctcttcggtggtccggtactggaaggcttcagcctgaccatgcttatcggtgtttccatcggtactgcatcttccatctatgtggcatctgcgttggctctgaaactgggtatgaagcgcgaacacatgttgcagcagaaagtggaaaaagaaggggcggatcagccgagtattctgccgtaatcaagttcccgttgatgttgaaaatcccggtcagaagatcgggattttttttgatgtatggagattgcgaaaatccccgcatcttgggaaactgcgcgtaaccctacatttcatccaggtaacttttcatggctatcatcccaaaaaactatgcgcggttagaaagcggctatcgcgaaaaagcattaaaaatctatccgtgggtctgcggtcgctgttcccgcgagtttgtttattccaacctgcgtgaacttaccgttcaccacattgatcacgaccataccaataacccggaagatggcagtaactgggaattgttgtgtctctattgccacgatcatgagcatagcaaatataccgaagcggatcagtatggtacgaccgttatcgcaggggaagatgcgcagaaagatgtcggtgaagcgaagtacaacccattcgctgacctgaaagcgatgatgaacaagaagaagtgattaaaacgtaaaattgcctgatgcgctacgcttatcaggcctacgttatttcagcaatatattgaatttacgtgcttttgttggccggacaaagcgtttacgccgcatccggcatgaacaaagcacacgttgttaacaatcagaaatgccgggaataaatcccggcattttcataatcagaagttgtaacctactaccaggtaaccaccccagccggtagagcgaacgttgaagttgccgttgccgaagttcagttctgcatcgtcgttccactgaccaccgtcgtgccagtaacgagctacgacagagtagtgccagtgatcgtagttcagagccagaatatggctggaagcgatagagttattagtacgggtcttaataccgttgattgcgttaccgctgtcatcccctaaatcggaaccccagtcgaagttggtgaagccgatgtagctcagctgaccgccccacagatcggtaatcggcacaaagtatttaattttgaaacggtaaccgtcccactcgttttcgttcgctgcgccatagttctgccactggtatttcgcatagacgttcatggacaggctcatcggcaggccagtgtcgatatcggtacccagacccatgtaccaggtgctctggcgaccatctttattacgacccatgtcgtaaatgtagttgttcgcgaagtaccactctttgaacggaccgaagctaaggtcagtattggtcagcttgtcgatggagaaacgtggttcgatttccataaacagcggagaaccgtggttccagatacctttagcatcggagttaccgccgaagaataccggcgcatccgcataaccatagaagtcgaaccagtcttttttagcgaatgcttcgtactcaaggtaggtatcgttgcggatctgcggtccgaaacgggtgtgatagcttccgacaacgttaacgctctggtgccaccagtcggaaagatactgcggtttgtcgttttcagctgcgttgacagtaaaagagctagagagcgccagtaccgcaccggctgccagtaatgtttttttcatatgtatgccactgtttgaaaatcccttgcgggagtgaaaaaggcgcaaattgcgtttctaaatatttcgtatacagaggagcctattataaaaatcattgctcacaaaaatatgtttcgtttcacagttctatcatttacgtaatcgattgcgttcacgtttacacacattcgggcggggattgtactgactttcgcccttgttgcaaacttttactatcaatccaggtgatgtaagcagagtaacaaaatgacggggaaagatgttgcgggacgcacaaaatcgtcccgaaatacgtttactgcataacaggttgaatgtcgtggatacgtacaaagcctaactgatccacagaaatcccctttaactgtaacggaatatcaacatcgctgggggcgaggacgctggcaggggcattaatcaattgattctgcacattgatttcctgaaagttgtctattgttccctgaatttgcccatattcaacagttccgctgaatgcgggcaagggatcattgctctcaccctgaatacgtagtgtaagggtggtgccatctgcatcaggcgtaatattcaccaggctcatacgtaaagtaccgatctggctttccagtcttgccggtgttttcgctccaggcagaaggtaaaccccactgctggattttgcattcagcctgttttgctgagtgattttgactgtttcttgattgagttgcgtcatctcctggttcagcgtgctgacgctgtgtttcatctgtcgcacttcactttgctgcacacaggcgctaaggctgaacaggcttcccagcaggagcagtcgaaaaacgttagtattcataggtcgtccctttctcgtcgcaattagcctaatggtagagggtaaaagcagcgaaagcatcgatcctttatctcaaaagcgttgcgcctttgttgtatcgtcagttcagggtaaaatagatttccgttaaccacctggtcaggacgccgtatgcattgcccattctgtttcgccgtggacactaaggtaattgactctcgtctcgtgggcgagggtagttccgtacgccgccgtcggcagtgtctggtgtgtaatgaacgtttcaccacctttgaagtggcggagctggttatgccgcgtgttgtaaaaagcaacgacgtgcgtgaaccgtttaatgaagagaaattgcgtagcggaatgctgcgggcgctggaaaaacgtccggtgagttccgatgacgtcgaaatggcaatcaatcatattaaaagccagctgcgcgccaccggtgagcgcgaagtgccgagcaagatgattggcaatctggtgatggagcaattgaaaaagctcgataaagtcgcctatatccgttttgcctctgtctaccgcagtttcgaagatatcaaagaatttggcgaagagatcgcgcgcctggaggactaagccgtgcaggacgagtattacatggcgcgggcgctaaagctggcgcaacgaggacgttttaccacgcatcccaacccgaatgtcgggtgcgtcattgtcaaagatggcgaaattgtcggtgaaggttaccaccaacgtgcgggtgaaccacatgccgaagtacacgcgttgcgtatggcgggtgaaaaagccaaaggtgcgaccgcctatgtcacactcgaaccctgtagccatcatggtcgtacgccaccgtgctgtgacgcactcatcgccgctggcgtagcgcgcgtggttgccagcatgcaagatcctaacccgcaggtcgctgggcgtggactttaccgtctgcaacaggctggcattgacgtcagccacggcctgatgatgagtgaagccgagcaattgaataaaggctttctcaagcggatgcgcaccggctttccttatattcagttaaaacttggcgcaagccttgatggtcgcacggcgatggcgagcggcgaaagccagtggatcactagcccccaggcgcggcgtgatgtacaactactgcgcgcgcaaagtcatgccattttaaccagcagcgccacggtgctggcggatgatcctgccttaacggtgcgttggtctgaactggatgaacaaactcaggcgctctatccgcaacaaaatctccgtcagccgatacgtattgtgattgatagccaaaatcgcgtgacgccggtacatcgcattgtgcagcagcccggcgaaacctggttcgcgcgtacgcaggaagattctcgtgagtggccggaaacggtgcgtaccttgctgattccagagcataaaggtcatctggatctggttgtactgatgatgcaactgggtaaacagcaaattaacagcatctgggtggaagcggggccaacgctcgctggcgcattgctgcaggcgggtttagtcgatgagctgattgtctatatcgcacctaaactattaggcagcgacgcccgcggattatgcacgctgccagggcttgagaaattagccgacgccccccaatttaaattcaaagagatacgtcatgtaggcccggatgtttgcctgcatttagtgggtgcatgatctcccggctcgaaagggaagcagcgcacgaaatattatgctaaaatccgcccccctgcggggccatactcgaacccgaaggaagaaaatgaacattattgaagctaacgttgctaccccggacgctcgcgtcgccatcaccatcgcgcgtttcaacaactttatcaatgacagcctgctggaaggtgcaattgacgcactgaaacgtatcggtcaggtaaaagatgaaaacattaccgttgtttgggtgcctggtgcctatgagctgccgctggcggcgggtgcactggctaaaaccggtaaatacgacgcggtgattgcgctgggtacggttattcgtggtggcactgcccactttgaatatgtcgctggtggtgcaagcaacggcctggcgcatgttgcccaggacagcgaaattccggttgcttttggggttctgaccactgaaagcattgaacaagcgatcgaacgtgctggcaccaaagctggcaacaaaggtgcagaagctgcactgaccgcgcttgaaatgattaatgtattgaaagccatcaaggcctgaaattagtaaggggaaatccgtgaaacctgctgctcgtcgccgcgctcgtgagtgtgccgtccaggcgctctactcctggcagttgtcccagaacgacatcgctgatgttgaataccagttcctggctgaacaggatgtaaaagacgttgacgtcctgtacttccgtgagctgctggccggggtggcgactaataccgcatacctcgacggactgatgaagccatacctgtcccgcctgctggaagaactgggacaggtagaaaaagcagtactgcgcattgcgctgtacgaactgtctaaacgtagcgatgtgccatacaaagtggccattaacgaagcgatcgaactggcgaaaagcttcggcgcagaagacagccataagttcgtcaacggcgtactcgataaagcagcacctgtgattcgccctaacaaaaagtgatatccaggccggtagattcacggaagaccgttccatgatcgccggccttttcttttttacctgctgaggcataacgtatggcatgtggcgagttctccctgattgcccgttattttgaccgtgtaagaagttctcgtcttgatgtcgaactgggcatcggcgacgattgcgcacttctcaatatccccgagaaacagaccctggcgatcagcactgatacgctggtggcgggtaaccatttcctccctgatatcgatcctgctgatctggcttataaagcactggcggtgaacctaagcgatctggcagcgatgggggccgatccggcctggctgacgctggcattaaccttaccggacgtagacgaagcgtggcttgagtccttcagcgacagtttgtttgatcttctcaattattacgatatgcaactcattggcggcgataccacgcgtgggccattaagtatgacgttgggtatccacggctttgttccgatgggacgagccttaacgcgctctggggcgaaaccgggtgactggatctatgtgaccggtacaccgggcgatagcgccgccgggctggcgattttgcaaaaccgtttgcaggttgccgatgctaaagatgcggactacttgatcaaacgtcatctccgtccaagcccgcgtattttacaggggcaggcactgcgcgatctggcaaatagtgccatcgatctctctgacggtttgatttccgatctcgggcatatcgtgaaagccagcgactgcggcgcacgtattgacctggcattgctgccgttttctgatgcgctttctcgccatgttgaaccggaacaggcgctgcgctgggcgctctctggcggtgaagattacgagttgtgtttcactgtgccggaactgaaccgtggcgcgctggatgtggctctcggacacctgggcgtaccgtttacctgtatcgggcaaatgaccgccgatatcgaagggctttgttttattcgtgacggcgaacctgttacattagactggaaaggatatgaccattttgccacgccataaagatgtcgcgaaaagtcgcctgaagatgagtaatccgtggcatctacttgctgtcggattcggaagtggattaagcccgatcgttcctgggacgatgggcagcctggcagcgattccgttctggtatctgatgacctttttgccctggcagctctacagcctggtggtgatgctggggatctgtatcggcgtctatctttgtcatcaaacggcgaaagacatgggtgtgcacgatcatggcagcattgtctgggacgaatttattggtatgtggatcacgctcatggcgctgccgaccaatgactggcagtgggttgccgccgggtttgtgattttccgtattctggatatgtggaagccgtggccgatccgctggtttgatcgcaatgtgcatggcggcatggggatcatgatcgacgatattgtcgccggggtgatttccgcaggcatcctgtattttatcggtcatcactggccgctgggtattctgagctaattgtgcaccgatgcctgatgtgacgcttgtcacgtctcatcaggcctggactcttatttaaatcctacgacaggatgcggtttatacggcgtttccagttcggcaatctgttccggcttcaaagtgatatccaccgcgttcaatagctcatcaagctgttcttcgcggctagttccgataatcggtgcggcaatgcccggtttactcaacaaccaggccagcgcaacttgtgctcgtgtcgcccccagttcttcactgacgcctgttaaccgctctgcgatctgcgcgtcattttcatcgctttctttatagagatttttccccacctcatcagacaccagtcgtgcggtagtttctccccacggacgcgtcagacggccccttgccagcgggctccatggaattaccgccacgccctcctgataacacagtggtagcatctcgcgctcttcttcacgataaatcagattgtagtgatcctgcatactgacaaactgcgcccagccgtgctgtttttggagttccagtgcctgagcaaactggctagcgtgcatactactcgcgccgatataacgcgctttcccggcttttaccacgtcgttgagggcttccagcgtctcttcgatcggcgtgttgtaatcccagcgatgaatttgcaggatatcgacataatccatgccgagacgtcgcaggctgtcgtcgatagagcgcaaaatttgcgcacgggataatccttccggtaaatcaccaacgcgatggaacactttggtcgcaacgaccacgtcttcacgacgggcgaaatcccgcagtgcgcgaccgacgatctcttcgctgctgccgtcagaataactgttggcggtatcaaagaaatttatgccgccttccagtgcacgtttaattatgggacggctgctttcttccggcagtgtccatgcgtgattaccgcgatctggctcgccaaaggtcatacagccgaggcaaagtcgggaaacgcgaaggtcggtttttcctaaggggttgtattgcatgctgccactcctgctatactcgtcatacttcaagttgcatgtgctgcggctgcattcgttcaccccagtcacttacttatgtaagctcctggggcttcactcgtttgccgccttcctgcaactcgaattatttagagtctatgaataatttcttaagcatagcaggagtggagtagggattatgccagccaggccttgattttggcttccataccagcggcatcgaggccgagttcggcgcgcatttcttcctgagttccttgcggaataaagaagtccggcaggccaatgttcagcacgggtactggtttacgatgggccatcagcacttcgttcacgccgctgcctgcgccgcccataatggcgttttcttctacggtgaccagcgcttcatggctggcggccatttccagaattaacgcttcatcaagcggtttcacaaaacgcatatcgaccagcgtggcgttcaggctttcggcgactttcgccgcttctggcatcagcgtaccaaagttaaggatcgccagtttctcgccacgacgcttcacaatgcctttgccaattggtagtttttccagcggcgtcagttccacgccgaccgcgttgccacgcgggtagcgcaccgcactcgggccatcgttatagtgatagccggtatagagcatctggcgacattcgttttcatcgctcggggtcataatgaccatttccggtatgcagcgcaggtaagagagatcaaaagcaccctgatgggtttgaccgtcagcaccaacaatgcccgcgcggtcgatggcgaacaggaccggaagcttttgaatcgccacgtcatgcagcacctgatcataggcgcgttgcaggaaagtggagtaaatcgcgacaatgggtttgtacccaccaatcgccagacccgcagcaaaggtcaccgcgtgttgctcggcaattgccacgtcgaagtagcgatccgggaatttacgactaaactcgaccatgccggaaccttcacgcatcgccggagtaatcgccatcagcttgttgtctttcgctgccgtttcgcacaaccagtcgccaaagattttactatagctcggcaaaccgccgctacttttcggcaaacaaccgctggagggatcaaatttaggcacggcgtggaaagtgatcgggtctttttctgccggttcataaccacgaccttttttggtcatgatatgcaggaactgcgggcctttcaggtcgcgcatgttctttagcgtggtgataagccccagcacatcgtgaccgtccaccgggccgatgtagttaaagcccagctcttcaaacaacgtgccaggcactaccatgcctttaatatgttcttcggtgcgtttgagcagctctttaattggcggcacgccagagaaaacttttttcccgccttcgcgcagactagagtaaagcttaccggaaagcagctgtgccagatggttgttgagcgcgccgacattttcggaaatgctcatttcattgtcgttgagaatcaccagcatatcaggacggatatcgcccgcgtgattcatcgcttcaaacgccatgcctgcggtaatcgcgccatcgccaatgacacagacggtgcggcgatttttgccttctttttcggcagcaaccgcaataccaattccggcactgatggaggtactactatgcccgacgcttaatacgtcatattcgctttcgccgcgccacgggaacgggtgcagaccgcctttctgacggatggtgccgattttgtcgcggcgtccggtcaaaattttatgcggataagcctgatgccccacatcccaaatcaattggtcaaacggggtgttgtagacatagtgcagcgccacggtcagttcgaccgtgcccagcccggaggcgaagtgcccgctggaacggctcacgctgtcgagtaaatagcggcgcagttcgtcgcagagtttcggtaaactctctttcggcaacagtcgtaactcctgggtggagtcgaccagtgccagggtcgggtatttggcaatatcaaaactcatcaggggcctattaatacttattgtttatttattacgctggatgatgtagtccgctagcgcttccagtgcgctggtatcgagactctgttcagccagttgtttcaggctctgacgggcatcgtcgatcagatcccgggctttcttccgggcttgctcaagacccagaagtgcagggtaggtacttttaccaagttgctggtcggcaccctggcgttttcccaacgttgcagtatctcccaccacatccaggatgtcatcctgaacctggaaggcaaggccgatgctctctgcatacttgtcgagtaccggcagagcacgacgtcctttatctccggcgcttaatgcaccaaggcgaacggcggcgcgaatcaatgcgccggttttatgacgatgaatacgctcaagcgcgtccagaggtacgtgtttgccttccgcgtctaaatctaatgcctgaccaccgcacattccggcaataccactggcgctcgccagttcagaaatcatgctaattctgtcgcggtcgctcacttccggcatatcggcatcgcttaaaatgctgaacgccagcgtttgtaaagcgtcgccagcgagaatcgcgtttgcttcgccaaacttcacatggcaggttggcaaaccgcgacgcagatcgtcatcatccattgccggtaaatcatcatgaattaaactgtaagcgtggatacactcaacggcggcagcgggtgcgtccagcgtgtttgtgctaacgccgaacatatgaccggtggcataaaccaggaaaggtcgcaggcgcttaccacctaataatgcgccatactgcatggtttcgaccacgggagtgttctgaaagggcagtggggcgataaaacggctcagcgcctggttggcctgcttaacgcaggcttcgagttgctgcggaaagtccattactcattgtccggtgtaaaaggggttagagaggcgtcttcattgtcagacagcagaatttgtacgcgctgttcggcttgttgtaatttggcctgcccctgacgtgccagctgcacgccgcgttcgaactcgttcagcgcctcttccagcggcaggtcgccactttccagacgggttacaatctgttccagctcgctcagcgccttttcaaagctggcgggcgcctcatttttcttcggcataatgaatgtctgactctcaatatttttcgccccgtcatggtaacggactcagggcaaatagcaaataacgcgcaatggtaaggtgatgtgcacagcaaagcgatgttagtggtatacttccgcgcctggatgcagccgcaggtgtgggctgctgtatttttccctatacaagtcgcttaaggcttgccaacgaaccattgccgccatgaagtttatcattaaattgttcccggaaatcaccatcaaaagccaatctgtgcgcttgcgctttataaaaatccttaccgggaacattcgtaacgttttaaagcactatgatgagacgctcgctgtcgtccgccactgggataacatcgaagttcgcgcaaaagatgaaaaccagcgtctggctattcgcgacgctctgacccgtattccgggtatccaccatattctcgaagtcgaagacgtgccgtttaccgacatgcacgatattttcgagaaagcgttggttcagtatcgcgatcagctggaaggcaaaaccttctgcgtacgcgtgaagcgccgtggcaaacatgattttagcagcattgatgtggaacgttacgtcggcggcggtttaaatcagcatattgaatccgcgcgcgtgaagctgaccaatccggatgtgactgtccatctggaagtggaagacgatcgtctcctgctgattaaaggccgctacgaaggtattggcggtttcccgatcggcacccaggaagatgtgctgagcctcatttccggtggtttcgactccggtgtttccagttatatgttgatgcgtcgcggctgccgcgtgcattactgcttctttaacctcggcggcgcggcgcatgaaattggcgtgcgtcaggtggcgcattatctgtggaaccgctttggcagctcccaccgcgtgcgttttgtcgctattaatttcgaaccggtcgtcggggaaattctcgagaaaatcgacgacggtcagatgggcgttatcctcaaacgtatgatggtgcgtgccgcatctaaagtggctgaacgttacggcgtacaggcgctggtcaccggcgaagcgctcggccaggtgtccagccagacgctgaccaacctgcgcctgattgataacgtctccgacacgctgatcctgcgtccgctgatctcttacgacaaagagcacatcatcaacctggcccgccagattggcaccgaagactttgctcgcacgatgccggaatattgtggtgtgatctccaaaagcccgacggtgaaagcagttaaaagcaagattgaagcggaagaagagaagttcgacttcagcattctcgataaagtggttgaggaagcgaataacgttgatatccgcgaaatcgcccagcagaccgagcaggaagtggtggaagtggaaaccgtcaatggcttcggcccgaacgacgtgatcctcgatatccgttctatcgatgaacaggaagataagccactgaaagtcgaagggattgatgtggtttctctgccgttctataaactgagcaccaaatttggcgatctcgaccagaacaaaacctggctgctgtggtgtgagcgcggggtgatgagccgtctgcaggcgctctatctgcgcgagcagggctttaacaatgtgaaggtatatcgcccgtaatttgtggtttttacgtcgcatctggtcagatgcgacgtttgccgcatccgacattactcgtaataattataaatccctgccgccatcaccagttgacttgccacttcatgggctttttcacgcccaaccaacaggtcgataattttcagaccaaagtcgatagctgtacccggcccctggctggtcagcaattttacccgtgcatcccagacgacgcgcttgtccagccattgttcggcgggaattttgtctttcagcgtcgggaagccggtcatattaccaatcgggaagatatcgtgcggcaccagcacggtggctggcgcggcgcaaatagccgcgacgatacgcccggaacggtggaactgtttaacggtttcaaccagcagagtgctatcgcgaaaacactccgcgcctttaatgccaccaggcagcacgatcacgtcatattcgccatcagccacttcgaccagcggcgcatccgccagcagcttcacgccgcggctgcaggtaatcgccaggttaccatcgctggcgacgctggcagtggtgactttgataccgccgcgaaccagcagatcgatagtggtgacggcttcagtctcttcactaccaggggcgaggcaaaccagtgcgcttgcgctcatattcactctcctttctttttttaattaccaggggcgaggcaaaccagtgccgatgcgctcatattcactctcctttctttttaccatttcaaacaggcgggtgttttccggtacggcaatcccatgcgcgcgggcgcggcgtaagagaaaaccattgatatagtcgatttcagtgtggcgcagcgcgcggatatcctgcaacatgctgctgatattttccgctgtggcatcaatcacctgcatcacgtaatcacgcaaatcttctgcactagtatgatgcccttcgcgttcgatcaccgccgcgacttcttcgcatatctgcataatttcttgcggatgatgacgtaattcaccgttcgggcaattccagatggcagtcagtggattaatcacgcagttgactgccagcttgcgccacagctcggcgcgaatattgttatgccaggcaacgtcaggcaacacggtttgcaaaatatccgccagataactgtaatccccgtcctgttgccgtgccgggccaatatgcgtgataccgtttgccacatgaataatgacattgccgtcgcggcgggctgcatgggtggtggtgcccatcagtaatggctgctgaatgttttgcaactcttcgatggtgcccatgccgttgtgaattaacagtattggcgtagttacaggcagtgtggacgcgaggcttttgacggcatcggaaacctgccatgctttcagcgtcaccaggagcagatcgctggtggcgagaaaatcgggatcgttggcggtcaggctttcgttaaatatgctaccatctgtctcaaccagattcacgctacaataaggttgcggtacgcgcagccagccctgaacttcatgaccctgtttgcaaagtgctgtaagccataattgccctaaggcaccgcatcccaatacggtaattttcattgttcctcctcacccgcaaccactccgggtgttcaataaggctatcccttaattgtgcatgctgttgcgactatgcacaattaagggatacgtcctggtgcaggactgtcggttatttaactttgcgggtattatgcttcgcatcaaaaatgaagggagaggaaaagatgccatctttcgatattgtctctgaagttgatcttcaggaagcacgtaacgcggtcgataacgcgagccgcgaagtggagtcccgttttgacttccgtaacgttgaagccagttttgagctgaacgacgccagcaaaaccatcaaagtgttgagcgagtccgatttccaggtcaatcagttgctggatattctgcgtgccaagctgctgaagcgcggcattgaaggcagtagcctggatgtaccggagaatatcgttcatagcggtaaaacctggtttgtggaagcgaaactgaaacagggcattgagagcgcgacccagaagaaaatcgtcaagatgatcaaagacagcaaactgaaagtgcaggcgcaaattcagggcgatgaaatccgcgtaacgggcaaatctcgtgatgatttgcaggctgtcatggcgatggtacgtggtggcgatctcggtcagccgttccagttcaaaaacttccgcgattaatcgcgactatgtgcgttttgttcatgtcagatgcggcatgaacgcctgattcggcctacaaaggtttgtaattcagaaactttgtaggcctgataagcgtagcgcagcaggcaattcgccgcgttttttatgcctgacgaattgcctgttctatctcaaagcgattcgtcactttgctgtcgattttcacataagcactatgttcttcttctgcaatcaacacttctttgatgccttcagtttctagcaaacgcacttttaacgcctcgtttgcggcaatgttcgccgggatttcaatgcgcaaactgctgacatacggcggttctttcatggtactggcgactgtcagccacactgcggccagcattgcgccagcgagaaataccccctgaccgtcaaacatgccgttaatccagccgcccaggctaccgccaatcgccacgccaagaaactggctggtggagtaaacacccatcgccgtacctttgtaacctgctgggctctctttactgataagactgggcaggagggcttccatcaaattaaacgccacaaagaaaagctgcacgccgaccaccagttgccagaactgcgtttgcgcgttccacaacacaatttccgcaaccacgatcaacccgacgcagaagacaaagacttgcttcattttgcgcttaacttcagcgtagataatgaaaggcacgacgctgccaaaggcgattagcattgtcgccagatagaccttccagtgttcagccgccgggaaccctgcatcagccagttgtccgggcagggcaacaaacgtgctcatcagcaaaatatgcagacacataatgccaaagttgagtttcagcagccgcggttccgccagcactttactgaaactgcctttcaccattccggactcacgattaagtacgtgagtgctactgttgggcacaacccaaatggtcaacgcaatgccggtcgttgccagaatagcgatcatccagaacagcgcgtgcagcccaagtttgtgagtgatgatcgggccaagcaccatcgcaatggcaaaggtaatgccaaagctcacgccgataaacgccatcgctttggtgcggttttgttcgcgcgtgagatcggaaagcagcgccataacggcggcggcaattgctccagagccttgtagcgcccggcccagaataattccccagatggagtcggaaagcgcagcgataacgctaccggcggcaaacaccgccagcccaccgacaattaatggtttgcgaccaatgcggtcggaaagcaggccaaacggaatctgaaaaacggcctgagtcagaccataaataccaatggcaataccgattaatgcttcgctggcaccttgcagagccatgccgtacgtggtcagaaccggcagaaccataaacatgcccagcatgcgcaagctgaatacggtccctaaaccccaggtcgcgcgcctctcacctggcgtcattttataatcgttcattaccacctctgttttaaattcgcgactagtgtaaagcggcaaacgaatggggtaaacatgcggattttttagtaaatatttcgagagggatatgtttctaatgctaagaaaaaaggtgccgtagcacctttttaatagagaggttttgttaccacacagcagccagcagcgtatggctgtccggtaccataaaatcaacggacatcatcacgctgagggcagtgatggcgatgatagagaagccgaacagcttgcgcgcccagattctgtcatcagcaactttataaccgcgcagagccatacctaaccaccagacgctaaccgccgcggcgaccaccagatatttatacccagcgtaaccgccaagagagagcatcagcgtggcaacggcaaaggcgatgatatacagcgtgatgtgattcttcgccacgctaatgccttttaccactggcaataccggaatgtttgccgcctggtaatccttaaagcggaaaatggcgatggcataggagtgaggcatctgccacaggctgaagatagccagcaggatcgctgcgccgctatcgaactcaccggttaccgcacagtagccgatcaccggcggcgcagcgccggagaggctaccaatcaacgtgccgtagacagagtggcgtttcatgtacaggctataaacgccgacataaaccacaaagcccatcacccccagccagcaggccagcggattcgcgccaaaccacagcagcataaagccagcaatacccagcaacgtggcgtacaccaggctgacagcaggagagatcaggcctttcaccagcacccgattcttcgtcctttccatctttctgtcgatatccctgtcgatgtagttgttaaacacacaaccgctcgccacaaccagactcaccccaaccagcgtgtagataaacaggggataatcaatgctgcccttactggccagcaggaatcccccaatcacgctgatcaggttgccaaagatgatgcctggtttcgttacttgcaggtattgcttaaacatcataaccgccgctcttagtgcatcatcatgttgtagttgaggttccacataatccagatggagcctacaaccaggatagcgatgattagcacggtgaagacaaacgccgtcatgttccagccttcatcacttttggtattcatgtgcaggaagcacaccagatgcaccagaacctgtaccactgccattgccaggattgttcccagaattacggccggagaggcagctcctgtcatcaccatccagaacggaatcaccgtcagaatgatgctcaggataaagcctgtcatgtaggtttttacgctgccatgggacgcgccgctgtgatcggtagaatgactcattacatcgcccccatcagataaacaacagtgaacacacagatccaaaccacatccaggaagtgccagaacaggctcaggcacatgatgcgggtacggttagtgctggtcaggccgcgacgggcgatttgcaccatcagcaccgccatccagataagaccagaagtgacgtgcagaccgtgcgtgccgaccagcgcaaagaacgcactcaggaagccgctgcgatccggacccatgccgttaacaatcaggtgatggaattcatagatttccatcccgataaatccggcaccaaacaaccaggtcaacgccagccaggagataacctggcttttgttgtttttgtacatggcgatagccgccatgccgtaggtgatggagctgaacaacagcaagaaagtttcaaccagaacgaacggcagttcgaaaatgtccttacctgtcgggccgcctgcggtgccgttcaccagaacggcataggtagcaaacaagatagagaacagaatgcagtcgctcatcaggtagatccaaaatccgaagattttggttccgcctgcatcgtggtgcccgtgttcgtgcgcgtgggcagtcgcgtgcgtcaaagtatcagttgccatttttcagccctgccttagtaatctcatcgaaatgctggttttccagtttttcgatttctgccaccggcacgtagtaatccacgtcctcgtcgaagcttttcacgatccaggtgatgatcatgcctgcgaagccaacaatcgccagccaccagatatgccagatcatggcgaaaccgaagatggtggagaaagctgcaatgacgatacctgcaccgctgtttttcggcatatgaatttcttcatagtggtcaggctttttatacgcttcgcctttctctttcatttcccagaatgcatcacgttcgtgaacgtgcggcactacggcaaagttatagaacggaggcggggaagaggttgcccactccagcgtacggccaccccacgggtcgccagtcaggtcacggttctggtcgcggtcgcgaatagaaacgtacatctgaataacgaggcagagaatacccagcgcaatcagtactgcaccgctggctgcaatcatcagcatggtgtggaactgcgggtcaatctgctggctcaaacgacgggtcatgcccatgaagcccagcgcatacagtggcataaaggcaacgaagaagccgatgatccagaaccagaacgcgcgtttaccccaggtttcgttcagtttgaaaccgaacgctttaggccaccagtaggtcatccctgcgaagcagccgaagaccacgccgccgatgatcacgttatggaagtgcgcaatcaggaacaggctgttatgcagaacgaagtccgcgcccggtacggccagcagcacgccagtcatcccgcccacgctgaaggtgacgataaaaccgatggtccacagcatcgcagaatggaacacgatgcggccctgatacatggtgaacagccagttgaagatcttcaccccggtcgggatggcgataatcattgtggtgataccaaagaaggcgtttacgttcgcgcccgcacccatcgtaaagaagtggtgcagccaaacgatgaagctcagcacggtgatacagacggttgcccataccaggctggtataaccaaacagacgtttacggctgaaggttgccgcaatttcggagaacacaccgaaaacaggcaggatcaggatgtaaacttccgggtggccccaggcccaaatcaggttgatgtacatcatcatgttgccacccatatcgttggtaaagaaatgggtgcccagatagcgatccagggtcaacaacgcgacggtaaccgtcagaattgggaaggaagcaataatcagtacgttcgcgcacagacttgcccaggtaaatactggcatcttgaacatggtcatgcccggtgcgcgcatcttcagaatggtaacgaagaagttgataccggtaagcgtcgtacctataccggatagctggagactccatatccagtaatcgacaccgactcccggactgtactctattccgcttagcggtggataggccagccagccggtctgcgcaaattcgcccacgccgagagaaacgttaaccagaatcacaccaacaacggtaaaccagaagcttaagttgttgaggaacgggaacgcaacgtcacgcgcgccgatctgcagcggaaccaccaggttcatcagaccgataacgaaaggcatcgccacgaagaagatcataatcacgccgtgcgcggtaaagatctgatcgtagtggtgaggtggcaggaagcccgcttcgcccgcgctggcaagagcctgctggctacgcatcataatggcgtcagcaaaaccacgcagcaacatcacaatcgccacgatgatatacatgataccgaggcgtttatggtcgacggaggtcagccactctttccacaggtaggtccacttaccgaagtaagtgatcaggccaacgagcgccagacctcccaaaataatgccagcgatcgtaaccatgacgataggttcatggaacgggactgcatcaagacttaattttccgaacatctttattcttcctcaacccctttaatgggcggattccgcgtggctcatgtccatgccttccataccttcgtgtgcgctgtgctcaccttctggctgggtcatgtccatgctcttaccgtgagccataaacttgttaattacatcggcaaacaagtctggtttcacgttggagaaatattccacctggttgtattcgctaggcgcggccagtttttcgaacgcagccatgtcagacatggtgttcgggctctgcttcgcttttgcgacccactggtcgaatgcggcgcgatccggtgttgcaatagctttgaacttcatgccactgaagcccgggccgctgtagctggcggagataccgtcataagtgccgggttcgttggcgatcagatgcaggcgagtctgcataccggccatggcataaatctggctacccagacgcggaatgaagaaggagttcatcacggagttggaggtcactttgaagtacaccggagtgttcgccgggaaagcgatttcattcacggtagcaatgccctgttccgggtagatgaagaaccatttccagtccatggaaaccacttcgatggtaatgggcttctcgtcgtgtgccagcggcttgctaggctcaagagcgtgagtggttttccaggtcagtactgcaaggaagatgatgattaagataggtaccgtccagaccacagcttccactttattggagtgactccagttcgggctgtacttagcatctttattgctcgcacggtacttccaggcgaaaccaacagccatcaagattgcgggaataacgacaatcaacatcaggccaaatgccgtcagtatcagactacgttgctccagaccaatctgtcctttgggatctaacagcgcagaattacagccactgagcaatacagtgcctgcaaataaactcaaccatcccaaacttttattgtatttcctgagtctcatttaacgacctcaattccacgggatctggtggcgtttaaagtgtgtgggcattttacgggaaggttacattactgtaaacatgattaaattcctgttacttggatttggctgccaggtcacatatgttgcaaaacatatcaggttgattttaagaagctgttgcaaaagggcgttataacaaaaggggagtgctgaaggagtctgggcgggcaattggtataaccaatgtgaaataaaacaattatttaacaaataattatcattagagtgacaactgggtgatgagaaaataaagactcattagctgaatcgtgtaagaaaaatagaatttataaatggcgccaataatttccaaacgctaagccgcacaaaagaacaaatattaataagcgatactgatgtttatttagccgtaataattacggcgagtgattactacagctaaataatatttacagattacgtcagatgcgtttttcgtagcgccagataatccagcaaaccaccaagcacgacgccagaaagggcgactaaaaccccgacttccagcagagcaggcaggaaagagaagtgcgtcaaatccagcgcgtccatcgtcaatagcagtaaccacacggccaacaggctgacgcccgccgccagtgtccacatggcaaaggcataacctgccggatatgcggtacgggagataaagttgtcatttactcgtgtatattcaagcgtctggcggcaaaccagcagcaaaataagccctggtacggcagcggcgacggagaatagatagaatgtgctccagccgtgtgcttcaacaaaccaacccgccacggggccgacataaactcgccctacagcagaaagcgcactgagcagggcaaattgagtagcggaaaaactcttattacatagcgtcattaacagcgcgacaaaggcacttgtgcccatcccgccacagaggttttcgaaaaagacggctgcgcccatgctgtagagatgcttatcagtaatgctcagcagccagtaaccggcgttagacgcaccttgtaaaatgccgaaaatcagcagtgcccggaacagactcaggcgctgcatcaaaatcccaccgtacaatgcgccaacaatggtcgctagtaagccaagcgttttgttaaccacgcctacttcacccgcatcaaacccgacgccgcgaatcaaaaacgtggttgtcaggctcatggcgaatgcgtcgcccagcttatacagcacgataagaagcaaaataagccaggcattattgcgaccaaagaaatctcgcagaggtgcaacaaccgcttgttccagcgttttgggcacaggaatggtgtcggttggttctggtgcaagcaacgtcgcgataatacaggggatcaacagtgccgccattaaccagtacatgccctgccagcccagccatttatctgccagccacagggctaggccgccggaaaccagcatccctaaacggtaacccagcacgctgattgccgcgcccgcaccacgttcttctgccggaagcacatcggttttccacgcatcgaagactatatcctgggaagcagagcaaaaagcgatcaccactgccagcgccgccatccagcggagttgggtgcctggttcgagaaaacccatcgccgcaatggcgactaataacaggatttgcgtggcgagcagccaaccgcgccgccgcccaaaaaatggaggcgtgtagcggtccatcagcggactccagaggaatttaaaaacgtaagcctggcctaccagagagaagaaaccaatggttttgagatcgatattctcgaccgtcatccaggcctgtaaggtaccggatgtcagggcgagcggtagcccggaagcaaaacccaggatcagcaatatggcactacgcggctgttgaaaaatacgtaaatattgactggacatgggcgtctacaggcccggcttgcaccgggccagagggcagaaattaacgcgcgttctgcttgatgaattcgtggatgctggtgtcctgagacatatcagcgatggtatcggtcagcacactgttaaccgcatcggcgatatttttgttggaggcctggaacgcaccttcaacgttgtagctggcacgatagtttttggtcattttgttgccattctgcgcggtagcgatgatggcgatatccgctttggtcgcgatgttgtagcgcacgttgccctgggacacgtcagcatacagttggctaacgatgatttgcagattaaccgggccattcggaccaaccatgtaaccacgcgcggtcatctgtttttccagcacttcttgcagcaggaaacgcagatcgcgggaggcggtcagggtaacgatttgattatcgcgggtgacttttgccagcgcctgatcggtacgctgatcggcaccattaatgcttacggtgacgcccatcaggcttggatcctgctgtggcagtgtaatcgtcggggaaacttcaatagttgttggcggttttgcgcatcctgcaagcataaacagagcaactaacgggaagaggatttttttgaacatgttcgggctctcagagactcttaagcgtgtttggtaaaaattcccgccatcataacattgccaacggcgaggggaagtgggtaaggcatgtaaattcatcatgttgacgaaataatcgcccctggtaaaagaaacactgatgcgaggcctgtgtttcaatctttaaatcagtaaacttcatacgcttgacggaaaaaccaggacgaaacctaaatatttgttgttaagctgcaatggaaacggtaaaagcggctagtatttaaagggatggatgacatctcagcgttgtcggaggagatatttcatgatgatacgtgagcggatagaagaaaaattaagggcggcgttccaacccgtattcctcgaagtagtggatgaaagctatcgtcacaatgtcccagccggctctgaaagccattttaaagttgtgctggtcagcgatcgttttacgggtgaacgttttctgaatcgtcatcgaatgatttacagtactttagcggaggaactctctactaccgttcatgcgctggctctgcatacttacactattaaggagtgggaagggttgcaggacaccgtctttgcctctcctccctgtcgtggagcaggaagcatcgcgtaaaaacgcatttgcaactgtcggcgcttttccagtatgttgctaaagattttatgaaaaacggcctgcgggccgttttgttttgtctggattttgcgctttttgcccagcattcagacgaaaattgcccgggaattgtgaaaaaatacgcgacagcgcgcaataaccgttctcgactcataaaagtgatgccgctataatgccgcgtcctatttgaatgctttcgggatgattctggtaacagggaatgtgattgattataagaacatcccggttccgcgaagccaacaacctgtgcttgcggggtaagagttgaccgagcactgtgattttttgaggtaacaagatgcaagttagtgttgaaaccactcaaggccttggccgccgtgtaacgattactatcgctgctgacagcatcgagaccgctgttaaaagcgagctggtcaacgttgcgaaaaaagtacgtattgacggcttccgcaaaggcaaagtgccaatgaatatcgttgctcagcgttatggcgcgtctgtacgccaggacgttctgggtgacctgatgagccgtaacttcattgacgccatcattaaagaaaaaatcaatccggctggcgcaccgacttatgttccgggcgaatacaagctgggtgaagacttcacttactctgtagagtttgaagtttatccggaagttgaactgcagggtctggaagcgatcgaagttgaaaaaccgatcgttgaagtgaccgacgctgacgttgacggcatgctggatactctgcgtaaacagcaggcgacctggaaagaaaaagacggcgctgttgaagcagaagaccgcgtaaccatcgacttcaccggttctgtagacggcgaagagttcgaaggcggtaaagcgtctgatttcgtactggcgatgggccagggtcgtatgatcccgggctttgaagacggtatcaaaggccacaaagctggcgaagagttcaccatcgacgtgaccttcccggaagaataccacgcagaaaacctgaaaggtaaagcagcgaaattcgctatcaacctgaagaaagttgaagagcgtgaactgccggaactgactgcagaattcatcaaacgtttcggcgttgaagatggttccgtagaaggtctgcgcgctgaagtgcgtaaaaacatggagcgcgagctgaagagcgccatccgtaaccgcgttaagtctcaggcgatcgaaggtctggtaaaagctaacgacatcgacgtaccggctgcgctgatcgacagcgaaatcgacgttctgcgtcgccaggctgcacagcgtttcggtggcaacgaaaaacaagctctggaactgccgcgcgaactgttcgaagaacaggctaaacgccgcgtagttgttggcctgctgctgggcgaagttatccgcaccaacgagctgaaagctgacgaagagcgcgtgaaaggcctgatcgaagagatggcttctgcgtacgaagatccgaaagaagttatcgagttctacagcaaaaacaaagaactgatggacaacatgcgcaatgttgccctggaagaacaggctgttgaagctgtactggcgaaagcgaaagtgactgaaaaagaaaccactttcaacgagctgatgaaccagcaggcgtaatttacgcagcataacgcgctaaattcgcacaaaggcccgtcaccgccaggtggtgggcttttttttgtcatgaattttgcatggaaccgtgcgaaaagcctctttcggtgttagcgtaacaacaaaagattgttatgcttgaaatatggtgatgccgtacccataacacagggactagctgataatccgtccataaggttacaatcggtacagcaggttttttcaattttatccaggagacggaaatgagttacagcggcgaacgagataactttgcaccccatatggcgctggtgccgatggtcattgaacagaccagtcgcggtgagcgctcttttgatatctattctcgtctacttaaggaacgcgtcatttttctgactggccaggttgaagaccacatggctaacctgattgtggcgcagatgctgttcctggaagcggaaaacccagaaaaagatatctatctgtacattaactccccaggcggggtgatcactgccgggatgtctatctatgacaccatgcagtttatcaagcctgatgtcagcaccatctgtatgggccaggcggccagcatgggcgctttcttgctgaccgcaggggcaaaaggtaaacgtttttgcctgccgaatagccgcgtgatgattcaccaaccgttgggcggctaccagggccaggcgaccgatatcgaaattcatgcccgtgaaattctgaaagttaaagggcgcatgaatgaacttatggcgcttcatacgggtcaaagtttagaacagattgaacgtgataccgagcgcgatcgcttcctttccgcccctgaagcggtggaatacggtctggtcgatagcattctgacccatcgtaattgatgccagaggcgcaactgtgccgctatacttatccagggcggcacaacgctgtaagcggcttgcgcctgagaatggcatttgcgtcgtcgtgtgcggcacaaagaacaaagaagaggttttgacccatgacagataaacgcaaagatggcagtggcaaattgctgtattgctctttttgcggcaaaagccagcatgaagtgcgcaagctgattgccggtccatccgtgtatatctgcgacgaatgtgttgatttatgtaacgacatcattcgcgaagagattaaagaagttgcaccgcatcgtgaacgcagtgcgctaccgacgccgcatgaaattcgcaaccacctggacgattacgttatcggccaggaacaggcgaaaaaagtgctggcggtcgcggtatacaaccattacaaacgtctgcgcaacggcgataccagcaatggcgtcgagttgggcaaaagtaacattctgctgatcggtccgaccggttccggtaaaacgctgctggctgaaacgctggcgcgcctgctggatgttccgttcaccatggccgacgcgactacactgaccgaagccggttatgtgggtgaagacgttgaaaacatcattcagaagctgttgcagaaatgcgactacgatgtccagaaagcacagcgtggtattgtctacatcgatgaaatcgacaagatttctcgtaagagtgacaacccgtccattacccgagacgtttccggtgaaggcgtacagcaggcactgttgaaactgatcgaaggtacggtagctgctgttccaccgcaaggtgggcgtaaacatccgcagcaggaattcttgcaggttgatacctctaagatcctgtttatttgtggcggtgcgtttgccggtctggataaagtgatttcccaccgtgtagaaaccggctccggcattggttttggcgcgacggtaaaagcgaagtccgacaaagcaagcgaaggcgagctgctggcgcaggttgaaccggaagatctgatcaagtttggtcttatccctgagtttattggtcgtctgccggttgtcgcaacgttgaatgaactgagcgaagaagctctgattcagatcctcaaagagccgaaaaacgccctgaccaagcagtatcaggcgctgtttaatctggaaggcgtggatctggaattccgtgacgaggcgctggatgctatcgctaagaaagcgatggcgcgtaaaaccggtgcccgtggcctgcgttccatcgtagaagccgcactgctcgataccatgtacgatctgccgtccatggaagacgtcgaaaaagtggttatcgacgagagcgtaattgatggtcaaagcaaaccgttgctgatttatggcaagccggaagcgcaacaggcatctggtgaataattaaccattcccatacaattagttaaccaaaaaggggggattttatctcccctttaatttttcctctattctcggcgttgaatgtgggggaaacatccccatatactgacgtacatgttaatagatggcgtgaagcacagtcgtgtcatctgattacctggcggaaattaaactaagagagagctctatgaatcctgagcgttctgaacgcattgaaatccccgtattgccgctgcgcgatgtggtggtttatccgcacatggtcatccccttatttgtcgggcgggaaaaatctatccgttgtctggaagcggcgatggaccatgataaaaaaattatgctggtcgcgcagaaagaagctagtacggatgagccgggtgtaaacgatcttttcaccgtcgggaccgtggcctctatattgcagatgctgaaactgcctgacggcaccgtcaaagtgctggtcgaggggttacagcgcgcgcgtatttctgcgctctctgacaatggcgaacacttttctgcgaaggcggagtatctggagagcccgaccattgatgagcgggaacaggaagtgctggtgcgtactgcaatcagccagttcgaaggctacatcaagctgaacaaaaaaatcccaccagaagtgctgacgagcctgaatagcatcgacgatccggcgcgtctggcggataccattgctgcacatatgccgctgaaactggctgacaaacagtctgttctggagatgtccgacgttaacgaacgtctggaatatctgatggcaatgatggaaagcgaaatcgatctgctgcaggttgagaaacgcattcgcaaccgcgttaaaaagcagatggagaaatcccagcgtgagtactatctgaacgagcaaatgaaagctattcagaaagaactcggtgaaatggacgacgcgccggacgaaaacgaagccctgaagcgcaaaatcgacgcggcgaagatgccgaaagaggcaaaagagaaagcggaagcagagttgcagaagctgaaaatgatgtctccgatgagcgcagaagcgaccgtagtgcgtggttatatcgactggatggtacaggtgccgtggaatgcgcgtagcaaggtcaaaaaagacctgcgtcaggcgcaggaaatccttgataccgaccattatggtctggagcgcgtgaaagatcgaatccttgagtatcttgcggttcaaagccgtgtcaacaaaatcaagggaccgatcctctgcctggtagggccgccgggggtaggtaaaacctctcttggtcagtccattgccaaagccaccgggcgtaaatatgtccgtatggcgctgggcggcgtgcgtgatgaagcggaaatccgtggtcaccgccgtacttacatcggttctatgccgggtaaactgatccagaaaatggcgaaagtgggcgtgaaaaacccgctgttcctgctcgatgagatcgacaaaatgtcttctgacatgcgtggcgatccggcctctgcactgcttgaagtgctggatccagagcagaacgtagcgttcagcgaccactacctggaagtggattacgatctcagcgacgtgatgtttgtcgcgacgagcaactccatgaacattccggcaccgctgctggatcgtatggaagtgattcgcctctccggttataccgaagatgaaaaactgaacatcgccaaacgtcacctgctgccgaagcagattgaacgtaatgcactgaaaaaaggtgagctgaccgtcgacgatagcgccattatcggcattattcgttactacacccgtgaggcgggcgtgcgtggtctggagcgtgaaatctccaaactgtgtcgcaaagcggttaagcagttactgctcgataagagtttaaaacatatcgaaattaacggcgataacctgcatgactatctcggtgttcagcgtttcgactatggtcgcgcggataacgaaaaccgtgtcggtcaggtaaccggtctggcgtggacggaagtgggcggtgacttgctgaccattgaaaccgcatgtgttccgggtaaaggcaaactgacctataccggtagcctcggcgaagtgatgcaggagtccattcaggcggcgttaacggtggttcgtgcgcgtgcggaaaaactggggatcaaccctgatttttacgaaaaacgtgacatccacgtccacgtaccggaaggtgcgacgccgaaagatggtccgagtgccggtattgctatgtgcaccgcgctggtttcttgcctgaccggtaacccggttcgtgccgatgtggcaatgaccggtgagatcactctgcgtggtcaggtactgccgatcggtggtttgaaagaaaaactcctggcagcgcatcgcggcgggattaaaacagtgctaattccgttcgaaaataaacgcgatctggaagagattcctgacaacgtaattgccgatctggacattcatcctgtgaagcgcattgaggaagttctgactctggcgctgcaaaatgaaccgtctggtatgcaggttgtgactgcaaaataatgacctcgcgcaaaatgcactaataaaaacagggctggcaggctaattcgggcttgccagcctttttttgtctcgctaagttagatggcggatcgggcttgcccttattaaggggtgttgtaaggggatggctggcctgatataactgctgcgcgttcgtaccttgaaggattcaagtgcgatataaattataaagaggaagagaagagtgaataaatctcaattgatcgacaagattgctgcaggggctgatatctctaaagctgcggctggccgtgcgttagatgctattattgcttccgtaactgaatctctgaaagaaggggatgatgtagcactggtaggttttggtacttttgccgttaaagagcgtgctgcccgtactggccgcaacccgcagaccggtaaagagatcaccatcgctgctgctaaagtaccgagcttccgtgcaggtaaagcactgaaagacgcggtaaactaagcgttgtccccagtggggatgtgacgaagttcaagggcgcatctactgatgtgccttttttatttgtattcggtgactttctgcgtcttgtgggctgacaattgcccccgtttcttgtcacaataggcctttgcgcgcatcgatacgttgcgtgaggtacacagtcatctacagcggagtgttgttacaccatgatggacagcttacgcacggctgcaaacagtctcgtgctcaagattattttcggtatcattatcgtgagcttcatattgaccggcgtgagtggttacctgattggcggaggcaataactacgccgcaaaagtgaatgaccaggaaatcagccgtgggcaattcgagaacgccttcaacagcgagcgtaatcgcatgcagcaacagctgggcgatcaatactccgagctggcagcgaacgaaggctatatgaaaaccctgcgtcaacaggtgctgaatcgtctgatcgacgaggcgctgctggatcagtacgcacgtgagctgaaactgggtatcagcgatgagcaggttaaacaggcgattttcgcgaccccagccttccaggttgacggcaaatttgataacagccgctataacggtatcctcaaccagatggggatgaccgccgatcagtacgcccaggcgctgcgtaaccagctcactacccaacagctgattaacggcgttgccggtaccgattttatgctgaaaggtgaaaccgacgagctggcggcactggtcgcgcaacaacgcgtggtgcgtgaggcgactatcgatgttaacgcgctggcggcgaagcagcctgtgaccgaacaggagattgccagctactacgaacaaaacaaaaacaatttcatgacgccggaacaattccgcgtgagttacatcaagctggatgccgcaacgatgcagcaaccggttagcgatgcggatatccagagctactacgaccagcatcaggatcaattcacccagccgcagcgtacccgctacagcatcatccagaccaaaactgaagatgaagcgaaagcggtacttgatgagctgaataaaggcggtgattttgctgcattagccaaagaaaaatctgccgatattatctctgctcgtaacggcggcgatatgggttggttagaagatgccactatcccggacgaactgaaaaatgctggtctgaaagaaaaaggccaactgtctggtgtcatcaaatctagcgtcggtttcctgattgtacgtctggacgacattcagccagcgaaagtgaaaagcttagacgaagtacgtgacgacattgcggcgaaagtgaaacacgaaaaagccctcgatgcgtactacgcgctgcagcagaaagtgagcgatgcggcaagcaacgacaccgagtctctggccggtgcagagcaagctgccggcgttaaagccactcagacgggttggttcagcaaagataacctgccggaagagttgaacttcaagccggttgccgacgctatctttaacggcggtctggtaggtgaaaacggcgcgccgggcatcaactctgacatcatcaccgtagacggcgaccgcgcattcgtgctgcgcatcagcgagcacaaaccggaagcggtgaaaccgttggcagatgttcaggaacaagttaaggcattggttcagcacaacaaagctgaacaacaggcgaaagtggatgctgagaaactgctggttgatttgaaagccggcaaaggtgcggaagctatgcaggctgccggtctgaaatttggcgagccgaaaaccttaagccgttccggtcgtgacccgattagccaggcggcgtttgcactgccactgccagcgaaagacaaaccgagctacggtatggcgaccgatatgcaaggtaatgtggttctgctggcgctggatgaagtgaaacaaggtagtatgccggaagatcagaaaaaagcgatggtgcagggtatcacccagaacaacgcacaaatcgtctttgaagctctgatgagtaacctgcgtaaagaggcgaaaatcaaaattggcgatgcgctggaacagcaataatcctgaagccgcctcgcaaaaaaatgcgttgcagctgtaacaagaaaaggtcgctttcgcggccttttccatttctgaacattgccatttgtttactgttttcactgccgttaaggtgattccactgttaacaaacaaggagaaaacagtatgaaacacggaattaaagcactgctcattaccctgtccctggcctgtgccggaatgtctcatagcgcgctggcggcagcttctgtggcgaaaccgacggcggtagaaaccaaagcggaagctcctgcagcacaaagtaaagcagcagtaccggcgaaagccagtgacgaagaaggcacccgggtcagcattaataatgccagcgcggaagagctagcccgcgcgatgaatggcgttggcctgaagaaagcgcaggcgattgtcagttatcgcgaagagtacggtccgtttaaaactgtggaggatctaaagcaggtgccggggatgggcaatagcctggtggaacgtaatctggcggtattaaccctgtaattaatttgcatagtggcaattttttgccagactgaagaggtcataccagttatgacctctgtacttataacaacaacgtaaggttattgcgctatgcaaacacaaatcaaagttcgtggatatcatctcgacgtttaccagcacgtcaacaacgcccgctaccttgaatttctcgaagaagcccgctgggatgggttggaaaatagcgacagttttcagtggatgacggcccataacatcgccttcgtcgtggtcaatatcaatattaactatcgtcgcccagcggtattaagtgacctgttaactattaccagtcagttgcagcaattaaacggtaaaagcggcatcttaagccaggtcattacactggagccggaagggcaggtggtagcggatgcgcttattacgtttgtttgtattgatcttaaaacgcagaaagcattagctctggaaggggaattgcgcgaaaagctggagcagatggttaagtaaacgttttgtggtgccggatgctcaagccgcatccggcgacacccggaataattacctcaacccggttttctgcttcatcgctgccatcaccgtcggtttatcggccagataatgattcaaaccgttggcgcgtaaattacatgccgcacaatgaccgcaaccgtcgcctttaaagccgttatagcaggtcaacgtttcgttacggactaaatccagtttgccgtaataatctgccagcgcccaggtttccgctttatcaatccacatcagcggcgtttcaaaacgaatatctttcgccatgcccaaactgacggcatggtttagtgctttcacaaactcatcgcggcaatccgggtagccggagaaatccgtttcgcagacgccagtaattacggcttctgcttttacctgatacgcatatattgccgccagcgtcaggaacaaaatattacgccctgggacaaacgtattcgggataccatcggcttcaggttcataatcaggcaccggaatgctgtcacgcgtcaggctactgaccgccagctcgttgagcagggtgacatccagcaccttatgcgcgcgtgcccccagtttcagcgccagttcgcgtgccacgtcgatttctgcgcgatgccgctgaccgtaatcgaacgtcacgcaatggacttcatcatattgttgtaatgcctgcaccagacaggtggtggaatcctgacctccactgaacacaacgacagcacgtttcatagataatcctgcttgaacaataaaagcgttatggtaacgcctgcgattaacccggaccagctattcattggcttggcgcgggaagccaggcttcggtaaattcaaaccagccgcgcggtgtcagtcgcacaccgttcacgccgggaggggcactaatgcgatagtgatagttgaacagcggcgtcagcgtcgcatctgtcattaactggctaaaaaccgctttcagggcattaaatcggttttcttcatcaggcattatttgcacggcatccagtgtgctttgtagatgtgcgtatgctggagcgtcgaaaacatgtggccacagcggatcgcagcgcagccattgctccagagtatattccggtgcttcgccaattaatctgtcgcccatcatgaggtctgcgtgtgcctgtagggtcgtgtcgtcccagttttttgcgttatgaaaaataattgtgagttcacagccttccgctgccagtgtcgcctgtaggcgttctgccatggtatgaagttctatcggtaggtgataaaccagcgtcaaggttttcggtagtttgacttcatccggtacctgccaatgcggaatagtccagcctggcagtaatgcatgactggcggtgatcaggttttctccgacttctaacgtttgtaataaaccggattgatgaataatggagatcacttttcgcgcctgccagagggagagtcggggacttttgcgcaacgtcaaatagcaaaaacctaaactgatgccgctactgacctggctgacccgttgcagctcctccggtttgccgatggtgatttgcacgggatgccgacaactggttcccaaatctttttcgaaaagcggcggagttatccagtactcaaccgctttaagcagcggatgacgtaaatggtaataatcatggctttccaggcgcaccagctctgctgtgaattgtgttaagcgaaaaggacccgtgccgatcagtgggaattgcggatgcgccagatggctgcaatagctcgccagccggtgcgcaagccagtaatcagggcgatgtaaaaagaaggtcagacactgcggatgggtgacttcaatacgcttcacgctaataaataattgatccagtgctggcagttgtaacagcatcaataatcgctggtgtaagtgactggcttttactgcatcgccgttatgccagtgtagggtactacgaagataaaagtcccagcgtaacccgtcagtagaggtttcccagtgatgcgctaaatcgccaatcgggcgctgagtattattatcgaagcgggtcaggccggaaaatatctgcccggcgagatgctgctcggcacggccgggcaaaaagcctggttgtagcggttcgagcgggcgatagtagggaatacgcaacgtgggtgtatcgttttgccattgtccgcccataaacggctgtaacagagtgcgcagctcacctggggccagttgcgccagctccagcacatcttgctgctttccggtttccagtgcctgttccatcatcgcattgcgtaggctttccggcgtgaccagaaagcgtaattgtccgcgctttccgcgtccactctgcgcctgccactccagccatcccgcctcctgtgcctgacgcaacagcgtacgaacatggcgttcgctgcaaaaacagcgttcggccagttcgctgacggtgacggtttgcggctttccggcggaaggttgccacagacgttgatactggttaagacggttgagcaatcgcatataaacccggaacaatattatttaactattcactattacttccgtatatatcaggtgatactcaatcaccattaaccgtgtcacagagtggagaaagaaatggctcgtctggcagcatttgatatggatggcactttattgatgcccgaccatcatttaggtgagaaaaccctctctactttggcgcgactgcgtgaacgcgacattaccctcacttttgccacggggcgtcatgcgctggagatgcagcatattctcggggcgctaagcctggatgcgtatttgattaccggcaacggaacgcgcgtgcattctctggaaggtgaacttttacatcgtgatgatttacctgcggatgtcgcggagctggtgctgtatcagcaatgggatacccgagccagcatgcatatcttcaatgacgacggttggtttaccgggaaagagatccctgcgttgttgcaggcatttgtctatagcggttttcgttatcagataatcgatgtcaaaaaaatgccactcggcagcgtcaccaagatctgcttctgtggcgatcacgacgatcttacacgcttgcagatccagctatacgaagcattaggcgagcgtgcacatttgtgtttttccgccacggattgcctcgaagtgctgccggtgggctgcaataaaggcgctgcattgacggtgctgacccaacatttaggtttaagcttgcgcgattgcatggcctttggtgatgcgatgaacgatcgcgaaatgttagtcagcgtcggtagcggatttattatgggcaatgcgatgccgcaactgcgcgcggagctcccgcatttaccggtgattggacattgccgaaatcaggctgtctctcactatttgacgcactggctggactatccacatctaccttattcccccgaataacgagatcccttccagcaccgggcaattgcccggttttttttgcgttgaatttgtcattttgtgccgtggtgtttaaaccgcacagaataaattgtcgtgatttcacctttaaaataaaattaaaagagaaaaaaattctctgtggaagggctatgttagataaaattgaccgtaagctgctggccttactgcagcaggattgcaccctctctttgcaggcactggctgaagccgttaatctgacaaccaccccttgctggaagcgcctgaaacggctggaggacgacggtatccttatcggcaaagtcgccctgctggatccggaaaaaataggcctcggcctgaccgcttttgtgctgataaaaacgcaacatcacagcagcgaatggtattgccgctttgtcacggtggttaccgaaatgccagaagtgctggggttctggcgcatggctggtgaatacgattatctgatgcgcgtccaggttgccgacatgaaacgctacgacgagttttataagcgtctggtaaacagcgtgccggggctgagcgacgtcacttccagcttcgcgatggaacagattaaatacaccacttctttacccatcgaataaatatccagaatcaggtcaggacacaacgcgtgcgattatttgctcaattaagctggtatttccgtcgggaatggcgtcgctatctcggggctgtcgccttgcttgtcattatcgcgatgctgcaactggttccgccaaaagtggttggtattgttgtcgatggcgtgacagaacaacactttactaccgggcagatcctgatgtggatcgccaccatggtgctgattgccgttgtggtttatctcctgcgttacgtctggcgggtattgctgtttggtgcgtcttatcaactggctgttgaactgcgtgaagattattaccgtcagctaagccggcagcatcctgagttttacctgcgtcatcgcaccggtgacctcatggctcgtgcgaccaatgacgtcgatcgcgtcgtgtttgccgccggagaaggggtgctgacgctggtggatagtctggtgatgggctgcgctgtgttgattatgatgtctacgcaaattagctggcagttgaccttattttccctgttgccgatgccagtgatggcgatcatgattaagcgcaacggcgatgctttgcatgaacgctttaagctggcacaggcggcgttttccagtcttaatgaccgcacccaggaaagcctcaccagtatccgcatgatcaaagcctttggtctggaagatcgccagagcgcgttatttgccgcggatgccgaagataccggcaaaaaaaacatgcgggtggcgcgtattgatgctcgtttcgacccgaccatctatatcgcgattggtatggcgaacttgctggcgattggcggcggtagttggatggtggtgcagggcagtttaacgctgggccagctcaccagttttatgatgtatttaggtctgatgatttggccaatgctggcgctggcatggatgtttaacattgtggaacgtggtagtgctgcgtacagccgtattcgcgcgatgctggcggaagcgccggtggtgaacgatggtagcgaacccgtgccggaagggcgtggcgaactggatgtaaatattcaccagttcacgtatccgcagactgaccatcctgcgctggaaaacgtcaatttcgccctgaaacccggtcagatgctgggtatctgcgggccgactggttccggcaaaagtaccctgttgagcctcattcagcgtcatttcgacgtcagcgagggggatattcgctttcatgatattcctctgacgaagttacaactcgatagctggcgtagccgcctggcggtagttagccagacgccattccttttttctgacactgtggcgaataacatcgcgctgggttgcccgaatgccacccagcaagagattgagcatgtcgcgcggttagccagcgtacatgacgatattttgcgtctaccgcaaggttacgatacagaggtgggcgagcgcggtgtgatgctttccggcgggcaaaaacagcgtatctccattgctcgtgcgttattagtcaacgcggaaatcctcatccttgatgatgcgcttagcgcggtggacggacgcactgagcaccagatcctgcataacctgcgtcagtgggggcagggaagaacggtaatcatcagtgcccatcgcctttctgcactgacggaagccagtgaaattattgtgatgcagcacggacatatcgcccagcgtggcaatcatgatgtgctggcacaacaaagcggctggtatcgcgatatgtatcgctatcaacaactggaggcggcgctcgacgacgctccggaaaatcgcgaggaggccgtcgatgcgtaactaaaaatcgcgaggaggccgtcgatgcgtagttttagccaactgtggccgactctcaagcgcctgttagcgtacggtagcccgtggcgtaaaccgctggggattgcggtcctgatgatgtgggttgcggcggcggcagaagtcagtgggccgctgcttatcagctattttatcgacaatatggtagcgaaaaataacctgccgttgaaagtggttgcagggctggctgcggcgtatgttgggctgcaactgtttgccgccgggctacattacgcgcagagcctgctgtttaatcgggcggcagtaggcgtagtgcaacagttgcgtaccgacgtgatggatgctgcgttacgccagccattaagcgagtttgatacccaacccgtcgggcaggtgatttcccgcgtcactaatgacactgaagtgatccgcgatctctacgttaccgtagtggcaactgtcctgcgcagtgccgcgctggtgggcgcgatgctggtggcgatgttcagcctcgactggcgaatggcactggtggcgataatgattttcccggtggtgctggtggtaatggtgatataccagcgttacagcacgccgattgtccgtcgtgtgcgcgcctatttggcggatatcaacgacggctttaacgaaatcatcaatggcatgagcgttatccagcagtttcgtcagcaggcgcgatttggcgaacgtatgggggaggccagtcgtagtcactatatggcgaggatgcaaaccctgcgcctcgacggttttctgctgcgtccgctgctgagtctgtttagtagcctcattctttgtggcttgttgatgctgtttggcttctccgccagcggcaccattgaagtgggcgtgctgtatgcgtttatcagctatcttgggcgacttaacgaaccattaatcgaactgaccacgcaacaggcgatgctgcaacaggctgttgttgctggtgagcgcgtgtttgaactgatggacggaccgcgccagcaatatggcaatgatgatcgcccgttacagagtggcaccatcgaagtcgataacgtgagttttgcttatcgcgatgacaatctggtgctaaagaacattaatctctctgtgcctagccgcaattttgtggcgctggtcgggcataccggcagtggcaaaagcaccctcgccagtttattgatgggctattacccgctaacggaaggtgagattcgccttgatggtcgtccattaagtagcctaagtcacagcgcgctgcgccagggcgtggcaatggtgcagcaagatccggtggtgctggcggataccttcctcgccaacgtgacgctggggcgggatatctccgaagaacgcgtctggcaggcgctggaaaccgtgcaactggcggagctggcgcgtagcatgagcgacggtatttacacgccgctgggcgagcaggggaataatctcagtgttgggcaaaagcaactgctggcactggcgcgcgtgctggtcgagacgccgcaaatcctgatccttgatgaggcaaccgccagcattgactccggtactgaacaggcgattcaacatgctctggcggcggtgcgtgaacataccacgctggtagtgattgctcaccgcttaagcaccattgttgatgccgacaccattctggtgcttcatcgtgggcaagccgtggagcagggcactcaccagcaactgctggcggcccagggacgctactggcagatgtatcaactgcaacttgcgggcgaagagctggcagccagcgtgcgtgaagaggaaagtttgagcgcctgaatagcgcaatatttcatcgttggtgcaaaaatgtaacgcactgtgcactgtcatagtgcgttttcattttcaaacttcttaacttcctgctctctttctcgtttttcatttctggcacaccgcttgcaataccttcttcgtgtagcagaaccattaccgaattctgaccggaggggatctatgaagctggtgaccgtgataatcaaaccattcaagctggaagacgttcgtgaagcgttatcttccattggtattcagggcctgaccgtcaccgaagtgaaaggtttcgggcgtcagaaagggcatgccgagctgtaccggggggcggaatacagcgtcaatttcctgccaaaagtaaaaattgatgtggcgattgctgatgaccaactcgatgaagtgatcgatatcgtcagtaaggcggcttacaccggaaaaattggcgacggcaaaatcttcgtcgctgaattgcaacgcgtcattcgtattcgtaccggcgaagccgacgaagcggcgctgtaatctctggcacacagcaacaggaacgaaaaatgaagatagcgacgataaaaactgggcttgctagtctggcgatgcttccgggactggtaatggctgcacctgcggtggccgataaagccgacaatgcgtttatgatgatttgtactgcgctggtgctgtttatgactattccggggattgccctgttttacggtgggttgattcgcggcaaaaacgtgctgagcatgctgacgcaggtgacggtgacatttgcactggtctgtattctctgggtggtttacggttacagcctggcgtttggtgagggcaacaacttcttcggcaacattaactggttgatgctgaaaaacatcgaactgacggcggtgatgggcagcatttatcagtatatccacgtggcgtttcagggaagctttgcctgcattaccgtcggcttgatagttggggcgctggcggaacgaatccgcttcagtgctgtgttgattttcgtggtggtatggctgacgctctcttacattccgattgcgcatatggtgtggggcggtggtttgctggcttctcacggtgcgctggatttcgcgggtggcaccgtggtgcacattaacgccgcaatcgccggtctggtgggcgcgtatctgataggaaaacgcgtgggcttcggtaaagaggcgtttaaaccgcacaacctgccgatggtcttcaccgggactgccattctctatatcggttggtttggctttaacgccgggagtgcgggcacggcgaatgaaatcgcggcactggcatttgtgaatactgtggtcgcaacggcggcggcaattcttggctggatcttcggtgaatgggcgctgcgtggtaagcctagtctgctgggggcgtgttctggcgcgattgccggtctggtcggcgtgacgccagcctgcggctacattggggttggcggcgcgttgattatcggcgtggtagctggtctggcgggcttgtggggcgttaccatgctcaaacgcttgctgcgggtggatgatccctgcgatgtcttcggtgtgcacggcgtttgtggcattgtcggctgtatcatgaccgggatttttgccgccagcagcctgggcggcgtgggcttcgctgaaggtgtgacgatgggccatcagttgctggtacagctggaaagcatcgccattacgatcgtctggtccggtgttgtggcatttatcggctacaaattggcggatctgacggttggtctgcgtgtaccggaagagcaggagcgagaagggctggatgtcaacagccacggcgagaatgcctataacgcgtaacaagcactgcaaaaaacagccggacggttttcacctccggctatttttttaattgtgattacgcatcaccccttcctgaacggtgctggcaaccagtacgccgtcttgggtataaaactcaccgcgcacaaagccacgtgcgctggacgcgctggtgctctccacgctatacagcagccattcattcaaattaaacgggcgatggaaccacatggaatggtcaatggtggcaatctgaatccccggttcgagaaaaccgatgccgtgcggctgtagagctaccggcaggaagttaagatcagaagcgtaaccgagcagatactgatgaacgcgcaggtcatccggcacgctaccatttgcgcggatccacacctgacgatgtggttctgcgacgtgacctttcagtgggttatgaaactccaccggacggacttccagcggacgatcgcagatgaatttatctttcagcactggcggcagcaggtgcgccaggctttgggcgatttgcgtttcgctagggaggccatcaggcgctggcgcggacggcattgttttttgatgttcgaaacccgcttctggtgcctggaaagaggcagtcatataaaaaatcggtttgccgttttgaatagcagcaacccggcgggcgctgaagctgttaccgtcacgcagcgtttcgacatcataaataatcggcttcttactatcgccagggcgaagaaagtagctgtgaaagctatgtaccagccgctcttcagggacggtctcttttgcagcatacaaggcctgacccacgacctggccgccaaacacctggcgtaaacctaaatcttcactctggccgcgaaagagtccttcctcaattttttccagatttaacaatgtcagtaaattttttagcgcctgactcatataactctccagtaacaaagctgccgcagcaagccaaagtgagttgagtataacgcaaatttgctactggtccgatgggtgcaatggtctgaattacgggctaattacaggcagaaatgcgtgatgtgtgccacacttgttgacgttactattttgttaaccactcttccggcgaggaaagttagcccgctggtgcattgataataaggagaaatgaatgaaactcgtgcacatggccagtggtttagcggttgcgattgcgttggcggcttgcgcagataaaagcgcggatattcagacgccagcaccggctgcaaatacgtctattagtgcaacacaacaaccagctatccagcaaccgaatgtctccggtaccgtctggatccgtcagaaagtcgcactgccgcctgatgctgtgctgaccgtgacactttctgacgcgagcttagccgatgcaccgagtaaagtgctggcgcagaaagcggtgcgtactgaaggtaaacagagtccattcagctttgttctgagttttaacccggcagatgttcagccgaacgcgcgtattctgttgagtgcggcgattaccgtgaatgacaaactggtatttatcaccgataccgttcagccggtgatcaaccagggcggaactaaagccgacctgacattggtgccggtacagcaaaccgccgtgccggttcaggccagcggtggcgcaacgactaccgtacctagcactagtccaactcaggtgaatccgtctagcgcagttccagctcctacgcaatattaagcgacgttaaccctctccgcccggagagggttagtagttccagcgataacgctgcaagtcgatttgcccgcttccgcttaccatcacaccttctgccagtaatgcctgtcgctgacgctgtaaatccggtccggttaggctaattgtgccgtggcgattaaccacccggtgccagggtaaggtgctgccttcagggagacgctttaacacaccgcccacctggcgcgcggcgcgggggcttcccgccagtttcgccacatcaccgtaagtggtgacatagccttcgggaatagcggcgacgatttgccagacgcgttggggaaaactatcttctttttccatcttttcttcctgaggtaatttttcagcataatctggaaaaacgccgctgtgaagtcgcattgcgcaagaaaccagcatctggcacgcgatgggttgcaattagccggggcagcagtgataatgcgcctgcgcgttggttctcaacgctctcaatgggggctctgttggttctcccgcaacgctactctgtttaccaggtcaggtccggaaggaagcagccaaggcagatgacgcgtgtgccgggatgtagctggcagggcccccacccatttctgcctcccaccgtttcgtcaaaaaatcccaacatggctaaactttaaccacaactgacgtcgcaagaattgtctggctgcgcagtacgcttcggaggtatgtctgatgaagtatgttgatggttttgtggttgccgttcctgccgataaaaaggatgcctatcgggaaatggccgctaaggctgcgccattgtttaaagagtttggcgcgcttcgtattgtcgaatgctgggccagcgatgtaccggatggcaaagtgaccgattttcgtatggcggtgaaagcggaagagaatgaagaggttgtctttagctggattgaataccctagtaaagaggtccgcgacgctgctaatcaaaagatgatgagcgacccacggatgaaagagttcggcgagtccatgccgtttgacggcaagcgaatgatctatggcggattcgagagtatcatcgacgaataagtagcgtgacgggctgtgcggcgtgccgtcagcccaaaaattcacaaatgttgctcggcccagcgtaagaaatcttctttcggtaatgccttgctgtagagccagccctgaccgtagtgcacgccatgctggcgtaaccactcttcttgtttactggtttcgattccctccgctaccattttcagtttcagtgtttttgccatttcgatgatatgcggcgtgacatttttatattccagcgcatcaacgaaagatttatcgatcttcagaatgtcgacatccagatcctgtaaataacttaaactactataccccgtaccaaaatcatcaagataaatttcatggcccgcctcccggtagcgagaaattatcggggcgctggttttcggatcggcaaactcgcgttcagtgagttcaagcgcgatctgtctgggattaacctgatagtgattgatcatgtcacgcagcaattgcgggattttttcgctggtgagcacgggggattcaagattgatgctaatatgctgctgtggatgctgacgcagccagtcgcccatatcttcaaagacgcttcttataatcagtagcgtcaatggctcagaaaggcccgtttgctgtgccagcggaataaaactatctggactcaaccaactaccgtctgtctgcggccagcgcgccagtgcctcagcaccgacaattttgccattggctaaggagacaatcggctgatagtgcacgcaaatatcacgattttcgatagcatcctgcagccgatgatgcggactctgaatacggcgcaaaatacgcagcacaaacatcgctgccagcaggccaatcaccaacccgagcggtaaccaaataaagacttgccgatgccagcctttctgcaacattttcgtactagcccatgtgatgatgctaatattcatctccggtaagggcaggatatcgtaaatgattccattattttcgatatgctcaccgggtgttttttgtagcctggtaataattccctgagcaatttcatcgctgctggttatgacaacgttatgggcattgccaataatggcggcatcaatttgccaactgctatagggaatgacatcaataaaggaagcggggtcgatcatgacgacataatgtgccgttcccatggcgaccatgtaacggataatgcctaaatcgttatggcttgttaaccagacacgataaccatctttgctaattttacctggctcggggaaggtatcgggcggactttcatgctccagagagctacactggggaacgttgttatcgatataagccacttcctgaatatagcgataactgtaagatacccgacgcatttccatgagatgggcttcgctacaggcagcgccttgccatctttccagctcctgcagcgcatctttcccttgtgtcgccaccttattggctcgaatagcgacgcgggaggaataggtatccagctcttcaataaagcttgtttctacctgctgatgggccagccagatgcttaagccgacaggcagcaatacactaagaatcagtactccgctaataaggccgaccagatgtcgtgttctcaccagcatatccttattaacacagtgtagggaaagtatatctgattgtggaaaaaggctggctggagataaggaggtagagctggtatttcatgaagtgatgggtggaaacgatcattgtcatttgaccaggcgcagagctttacgcctggtatgtaaccctaacttaagatgtactttcggcgcgagcgagggtaaaaatatcgtaaaaagacagttcacctttacggacgatcattttttgcagttgttccttatgaacatccgcgacacgcggagagttcaagatggcttcaaccagcgcggcaggtacaaagcgcgtgttgtaccattcgccgttatagcaaacgcggaaatccagcacgtcgatatcttcatagcggtagcgtgggtagacatcgaaaaagaagaaaccattaagcaggataaataatacaaccagtagccagacagagccactcagcgtttcggactgcaacatcaccgccagggtggcaaaaaaagcaacgtacataccgataaacagccccggatgtttacggataaaactgatactaaagcggggtttgttgtcgcgtttttcgcgggtattcagagactcaatcgtttcggtcagcaggcgttgtatttcggtcatcgtttgccttcgtggtatctgcaactttccagggaacaccctattttaacgtgggaatagtagaggggaagtaacagatctaccacaattttgcataacagttgcgaaaaaccgattacaattttttaattattctggctggattaccgcccacgacaacgttgtccgggacatcttttgtgacaactgcaccactggctaccacgacgttatcaccaatggtcacaccagggttaatgaccgcgcgtccgccaatccagacgttattaccgatggtgacgggtttccccagttcagcaccgctattacgtgctacagggtcgatgggatgtgttgccgtgtagatatgaacgcctggtgccaacatacagttatcaccgatgcgaatagggcagacatcaagcatcacgcaatcgaagttggcgaaaaaattattaccgagaaaaatgttatagccatagtcacagcgaaacgttggctcaatataagcctctgtcacctgaccgaatagatcagcgagaatttgctggcgtaatgtgtgctcttccgccagggaatgattgtatcggtgaataagctgacgagcgcgcaggcgatcgcgagataacgtctcatctgcgctgcgatacaactcaccagcaatcatcttttctttttctgtgctcattactgacctccggttgctgaaaatgcggcaacacagtaagacgaaaagtcagtgaagagaacgttcccattacatctgtgtgataaagatcacatagggtatgtcttcatggcgaaaaagtataaaattcttaataaacagccggttatagctccgaaagcgaattatttattagcgaataaatttccatacactggaagggatcttgtcgtacagtttattcatggtcaattcggcgaggcggtgatctgcggcactgtaaaataccgccagttcattatcacttaattcgtatttatttttctcgataacacgctccagcgtgtcaattgtctggcaacgacgtaaacgcattaaataatcggttttcgttaaaggtttttcggacatacttctacctatggttgtaataattttaacaagataaactcgcaggattctctttcgtcgcattgacaaaacaacggaatagtcgattaccactcttccgccatttctgaagatcctgcatattaataccataactactgaacaacataaaggtgtcatccagatattcgtcgatctgctcaatgagcttattgtcttcattatacttaattttgtaattaagtgcgaaggtcgcaatatgctcaatcagttcattcaactggaggttgatcgcgctggttgggtcgtttacccagccatgattgctttcttcaaggtttgcaaggcagtcatgatacagggtttcacagagaaacttaagctgtgcgatatcatgtcttttgggactgtattcatccataacgcgtccccttcttagcggttgaactaacggacacctttcgggatggaaaaaacttactgacctggacttgccctctcgtttgttagcttaactataagccactctttgcaggttttcatcgcattattacgaaaaattacaattaggaaggaagcgggacaggactcactttttcatactagcactaacccgcagcaggtaaaagcagtttgctcgaactattcataacatttcaggattatcgccagatgaaattggtgacactaataccaggattgctctgaatatgacgtaataaccgaggaatgaataaagaattaccgcaaataattaagaatagcctctaaatgattatggattattaaatctattagcgctacttaatataaattaactaacaatcagtattttttatgaattttatccgtggttaatactggttttcgtatgagatcctgagttggtggttcaattactccttaatgttcgtaggttatgcataaaaaaggccgcttacgcggccttagtgattacacgttgtatcaatgatgatcgacagtatggctgtgctcgatatcttcattcttgcggctaaagcggcggcgaaccaccacaaagaataccggaacgaagaagattgccagtaccgttgcggtcaccatcccgcccattacaccggtacctactgcgttctgcgcgccggaaccagcaccagtactgataaccagcggcataacgccgaggataaacgccaggctggtcatcaggatcggacgtaaacgcatccgcaccgcatcaagcgtcgcttcaatcagacctttaccttctttatccatcaagtctttggcgaattcgacgataaggatcgcgttcttcgcgctcaacccaatggttgtgagcaggcctacctggaagtaaacgtcattggtcaggccacggaaggtggcagccagcaacgcaccgataacccccagcggaacgaccagcataacggagaacggaatgctccagctctcgtacagcgccgccagacacaggaacacgacaatcaagctaatcgcgtacagactaggtgcctggttgccggagagacgttcctgataggacatccccgtccagtcatagccaacaccggtaggcagtttgctcgccagttgttccatcagctccattgcttcaccggtacttttacccggtgccgcctggcctaagatttccatggatggcaggccgttgtaacgttccagacgcgggctaccgtactcccaacgagaagaggagaacgcgctgaatggcaccatctgaccatcagcagcacgaacataccagtcgccgatatcatccggcagcatacggtatttcgcttcactcatgacataaactttcttcacacgaccgcggtcgataaagtcgttcacatagctgccgccccatgcagcgcccagagtggtgttaatgtcgttgatagaaacacccagcgcctgcgctttttcctggtcgatatcaatcttaaactgcggggtatcttccagaccgtttggacgtacgctggtcaacatatcagggtgcttcgctgcttctgcaagcaactggttacgcgcctgagtcagtttttcgtgaccaaggccagcctggtcaatcagctcaaagtcaaagccggttgcagtacccagttccacgattgcgggcaggttaaaggcgaaaaccatcgcatctttgatttggctgaaagcgcgtgttgcacgcatggtaatcgcttcaactttgttttcttcgcccggacgatcggcccagtccttcaaggaaacgaacgcaataccggtattctgaccacgtcccgcaaagccgaagccgttaacggcgaacacgctctcaacgttgttcttttctttggtcagatagtaatgcgttacctcattgagcactttctgtgtacgttcctgcgttgcacctgctggcagctgaaccatggtcataaacacgccctggtcctcatctggcaagaaggagcttggcagacgcacgaacagataggccatgccgaccacgatgatcagatacagcaccaggtaacgccccgtactgcgcagaataccgcctacgctgtcggtgtagtggtgcgtgctcttctcgaacatgcggttaaaccagccgaagaagccttttttaccttccccgtgatcgcctttggcaatcggtttcagcatggtggcacaaagagctggagtcaggatcaacgccaccagtacgctcagcgccattgcactaacaatggtaatagagaactgacgatagatagcaccagtagaaccgccaaagaaggccatcggtacgaataccgcgctcagtaccatcgcgataccgaccagagcgccctgaatctgccccatgctcttacgggtagcttcttttggcggcaaaccttcttccgccataacacgctcaacgttttctaccacaacgatggcgtcatccaccaacaggccgatggcgagcaccatcccgaacattgttagcgtgtttatgctgaagccaaaggcggcaaggacggcaaaggtcccgagcaataccaccggtacggcaatggtcggaatcaacgtcgcgcggaagttctgcaggaacagatacataaccaggaacacgaggatgatcgcttcgaccagcgttttaaccacttcgtgaatagagattttcacgaacggcgtggtgtcgtatgggtaaacaattttcagaccgctcgggaagaacggttccatcttcgccagttcagcacggattgccgcagcggtatccagcgcgtttgcaccggtcgccagcttgatccccagaccggaagccggttggccgttaaactctgcgatgatgtcgtagttctcaccacccagctcaatcttcgcgacgtcacgcagcagcacgcgggaaccatcctgattcactttcagcaggattttgccgaactcttcagtagaggtcagacgcgtctgagcaataatagaggcgttaagctgttggcctttcaccggcggcgtaccaccgagctgacccgccgcaacctgggcgttctgcgctttgatggcggtaatgacatcaaccggcgttagctggaatttgttcagctcattcgggttcatccagatacgcatcgcgtactgactaccgaacaactgaacatcacccacgccgctcgtacggctgatggcatctttcatattcgccgccacgtagtcggagatatcctcctgcgtcatggtgccatcggtgttgataacgccgacaaccatcaggaagctgctggaacttttctcaacgctcaccccttgctgctgaacttcttgcggcagcaacggcatcgccagctgcagtttgttctgcacctgaacctgcgcgatatccgcatcagtaccagactcaaaggtcagggtgatctgcacggtacccgtggagtcactgttagaggacatgtacatcaggttatcgataccgttcatattctgttcgataacctgtgtcaccgtgtcctgcactgttttcgcatcagcgccggggtaggaggcggagatcgttactgccggcggtgcaatcgtaggatattgcgccaccggcagtttgaggatcgccagcccccctgccaacatgatgataatggcgatcacccacgcaaaaatcgggcgatcgataaagaaattaggcatgtcttaacggctcctgtttaagttaagacttggactgttcaggctgagcaccgcttgcggcttgctggttattatcagcggtaacttcttgtgcttttacctggacaccaggacgcactttctgcagcccacttattactacgcgatcgcctgctttcagaccttctgtcaccagccacttatcgccaatagcctggcttgcaacgatcggacgggtttccactttgtcatccgcgccaactaccagtacggtggcatcgccacgcggcgtacgggttacgccctgttgcgggactaaaatagcgtttggattaagcccttcttccagacgtgcgcgcacgaacatacccggcagcagagtgtgatccgggttcgggaagatagcgcgtagggtgatagacccagtggtctgatcaacggtaacgtcagagaattccagcgtaccgtcctgcgggaacttaatgccgtcactggtgatcagactcactttggctttgccgttctcttgtttcagcgtgccattcgccagttcctgtttcaggcgcaggaagtcgttgctggactgggtcacatcaacgtagatcggatcaagttgctgcacggttgccagcgcagtcgcctgaccgttctgtaccaatgcgccttccgtcacgttgctcttaccaatgcgaccgctaatcggagaggtgactttggtgtaagccagattgatccgcgcagtttcaacggcagctttcgccgcagttaccgcagcattcgcctgttgcgcatcagccagagcctgatcgtactcttgcttactgatgtactgagtaccgagcagtttctgataacgattcaccgtcaattgcgcgatattggctgcagcctgggctttcgccagatcacctttcgcactgtcgtatgtcgcctgataggtcgcaggatcaatctgatagagagagacacctgcttcgatgtcgctaccttctttgaaattacgcttcaggataatcccgctaacttgaggacgaacttctgcgatccggtaggcactggtgcgacccggaagctcggttgtgatctgcagaggttcagttttgactgttactacgccaacggcgggcatctgctggccaccttgttgggcctgtttgtcgtcacatcctgttagggctaagctgccactgagcatcagaacgaccgccagaggcgtaaaccctctgtttttgttcatatgtaaacctcgagtgtccgatttcaaattggtcaatggtcaaaagttaataaacccattgctgcgtttatattatcgtcgtgctatggtacatacattcacaaatgtatgtaaatctaacgcctgtaaattcacgaacatatggcacgaaaaaccaaacaagaagcgcaagaaacgcgccaacacatcctcgatgtggctctacgtcttttcagtcagcagggggtaagttccaccagcctgggcgagattgcaaaagcagctggcgttacgcgcggtgcaatctactggcattttaaagacaagagcgatttgttcagtgagatctgggaactgagtgaatccaatattggtgaactagagcttgagtatcaggcaaaattccctggcgatccactcagtgtattaagagagatattaattcatgttcttgaatccacggtgacagaagaacggcgtcgattattgatggagattatattccacaaatgcgaatttgtcggagaaatggctgttgtgcaacaggcacaacgtaatctctgtctggaaagttatgaccgtatagaacaaacgttaaaacattgtattgaagcgaaaatgttgcctgcggatttaatgacgcgtcgcgcagcaattattatgcgcggctatatttccggcctgatggaaaactggctctttgccccgcaatcttttgatcttaaaaaagaagcccgcgattacgttgccatcttactggagatgtatctcctgtgccccacgcttcgtaatcctgccactaacgaataaccctgaatctgactccaggatttttcctggacattttcgtcgttgctattctggttcactgcgtcgtgatattcttgcggtttgactttttcaggtcgttcttcaggttcagaaaccttcattcatcatgactatgttccagtattacaaacgaagtcggcattttgtttttagtgcatttattgcttttgtttttgtcttgttatgccagaacacggcgtttgcgcgggcgagtagcaatggtgatctgccgacaaaagcggacctgcaggcgcaacttgacagtctaaataaacaaaaagatctttctgctcaggacaaactggtgcagcaggatctgacagatacattagccaccctcgataaaatcgatcgcataaaagaagagacagttcagctacggcaaaaagtcgctgaagcgccggaaaaaatgcgccaggcgaccgcggcgttaacagcacttagcgatgtcgataacgacgaagaaacgcgcaaaattctgagcacgctgagcttgcgccagctggaaactcgcgttgcccaggcgctggacgatttgcaaaacgcacaaaacgatctggcgtcttataacagccagctggttagcttacagacgcagcccgaacgcgtgcaaaatgcgatgtataacgctagccagcagctgcaacaaattcgcagtcgtctggatgggactgatgtcggcgagacagccttacgtcccagccagaaagtgttaatgcaggcccagcaggcgttgctgaatgcggagattgaccagcagcgtaaaagcctggaagggaacaccgtcttgcaggataccttgcaaaagcaacgtgattacgtgacggcgaacagcgctcgtctggagcaccagttacaactgttgcaagaagcggtaaacagcaagcgcctgactttaaccgaaaaaacggcgcaggaagccgtctccccggatgaagccgcgcgtattcaggctaatccgctggtgaagcaggaactggaaattaaccagcagttaagtcagcgtctgattaccgcgactgaaaacggtaatcagttgatgcagcaaaacattaaagtcaaaaactggctggagcgggcgctgcaaagcgaacgcaatattaaagagcagattgccgtcctgaagggcagcctgctgttgtctcgtatcctttaccagcaacaacaaacgctgcccagcgcggatgaactggaaaacatgaccaaccgcatcgcggatttgcgtctcgaacagtttgaagttaaccagcagcgtgatgcactcttccagagcgatgcgttcgtcaacaaactggaagaaggtcacaccaacgaagtcaacagcgaagttcacgatgcgttattgcaagtggttgatatgcgtcgcgaattgctggatcaactcaacaaacagttgggtaaccagctgatgatggccattaacctgcaaatcaaccagcagcagttaatgagtgtgagcaaaaacctgaaatccatcctgactcagcaaatcttttgggtgaacagtaaccgtccaatggactgggactggatcaaagcgttcccgcaaagcctgaaagatgaatttaagagcatgaaaatcacggtgaactggcaaaaagcctggcccgccgtttttatcgctttcctcgctggtttgccgctgctgttgattgccgggctgatccactggcgtctgggctggctgaaagcgtatcaacaaaaactggcttccgctgtgggttccctgcgtaacgacagccagctcaacacaccaaaagcgatccttatcgacctgatccgtgcgctgccggtgtgcctgattattctcgcggttggcctgattctgttgaccatgcagctcaacatcagcgaactgctatggagcttcagcaaaaaactggcgatattctggctggtgtttggcctgtgctggaaggtactggagaaaaacggcgttgccgtacgtcacttcggcatgccggaacagcagaccagccactggcgtcggcaaattgtccgcatcagtctcgcattgctgcctatccatttctggtctgtggtggcagaactttccccgctgcatctgatggatgatgtgctggggcaagcgatgattttcttcaacctgctgctgattgccttcctggtatggccgatgtgccgcgaaagctggcgtgataaagagagccacaccatgcgactggtcaccattaccgtgctgagcataatcccgattgcgctgatggtgctgactgctacaggctacttctacactacgctgcgtctggcaggacgctggattgaaaccgtttatctggtgatcatctggaacctgctgtaccagacggtactgcgtggcttaagcgtagcggcgcggcgtatcgcctggcgtcgtgcgctggcgcgtcggcagaatctggtgaaagagggcgcagaaggtgctgaaccgccggaagaacccaccattgcactggagcaagttaaccagcagacgctgcgtattaccatgttgctgatgtttgcgctgttcggtgtcatgttctgggcaatttggtccgatttgatcaccgtgttcagctatctcgacagcatcacgctctggcattacaacggcactgaagctggcgctgcggtggtgaaaaacgtcaccatgggcagtctgttgtttgcgattatcgccagtatggtggcctgggcgttgattcgcaacctgcctggtttactggaagtgctggtgctcagccgactgaatatgcgccagggcgcgagctatgccattactaccatccttaactacatcattattgctgttggtgcgatgacggtgttcggaagcctgggcgtctcttgggataaactccagtggctggccgcagcattatccgtaggtcttggttttggtttacaagaaattttcggtaacttcgtctccggtttgatcattctattcgaacgtccggtgcgtattggcgatacggtaaccattggtagcttcagcgggacggtaagtaagatccgtattcgtgcgacaacgattaccgatttcgatcgcaaagaagtgatcatcccgaacaaagcgtttgttaccgagcgtctgatcaactggagcttgactgacactactacgcgtctggtgatccgtctcggcgtggcctatggctccgatctggaaaaagtgcgtaaagtgttactgaaggcggcgactgagcacccaagggtgatgcacgaaccaatgccggaagtcttctttacggcatttggtgccagcacgttggatcatgagctgcgtctgtatgtgcgtgaactgcgtgaccgtagtcgtactgtcgatgagctgaaccgtactatcgatcagctgtgccgtgaaaacgacatcaacattgcctttaaccagcttgaagtgcatctgcacaacgagaagggcgatgaggtgacggaagtaaaacgcgactacaaaggcgatgacccgacgccagcggtagggtaaaaacgaaagggggcaacatttagttgccccgagattgctaacaaagtgcgcgttgttcatgccggatgcggcgtgaccgccttatccggcctacgaaaccgcaagaattcaatatattgcaggagcggtgtaggcctgataagcgtagcgcatcaggcagttttgcgtttgcccgcaaccttaggggacatttagcgaccccatttatttctcacttttccgcctcatcatcgcgcgttaatttcttttcataatcacgctttacaatatccagcgcgcgcagcacggtactggcagggatctgattttcctccagcagcacaatcaaatcgacagccagtttgacatcgtcaggggcattttccagactcatattctctccattgttagcgggttaaacgcgctaacctgttttcgattttttccagcgcatggcggcagcgtgccaggcgcgcttcataggcttccacttcacgatgcagcgtttgctgttccacgagatcggtcacccgcgccagacgggctctgcgttcggcaaccatctcacgtagccgccgctcaaaatcctgatgctgaatacgtttacgctgccagcgggcaattttcggtggtgcactgtcccactcgcgcaaactccaggcggaggcttcacgcgcgatggcttccagttgtgccgccagatgttccgccagccaggccacttgcggcagctgttgctgctcaactgcatgacgaagcgcagccagattatcgcccgcctcgtcgagacaagcctgtagtgttgtcgcacgagtctgaaaaagatgcctgtcgaaacgagcacttagcgtggcgaactgactcaccggggcacaacgctgacgcagcgtagcgagctgtccttccagtttttccagcagcagggcggttttcacgataagacctcaatgaaaatgataattgttatgctaaagtagccactctgtaagctgacaacactcaatatgcaacgaatcattttaatcatcattggctggctggcggtagtgctgggtacgctgggcgtggtattaccggtattaccgacgacgccgtttatcctgctggcggcctggtgctttgcccgttcttccccgcgctttcacgcctggttgctgtaccgcagttggtttggcagctatctacgtttctggcagaaacatcatgcgatgccgcgcggcgtcaaaccgcgggcgattttgcttattttgctcacgtttgccatttctctgtggttcgtccagatgccatgggtgcgcatcatgttgctggtaattctcgcctgtttgcttttctatatgtggcgaattccggtgattgatgaaaagcaagaaaagcactgaagcacaacaatcgcagttgcaattattgcgtacagccagtacattctggcgttttcgagcacaggcgcaggcggtcaaaggttaaacaactgttacttttgatacgtttaaaacgcgccgtgagtaccaccgtaacaagcaggcatacacttatgaccgcgactgcacagcagcttgagtatctcaaaaatagcatcaaaagcattcaggactacccaaaacccggcattcttttccgcgatgtcaccagcttactggaagacccgaaagcttacgctctcagcatcgacttgctggttgagcgttacaaaaatgcgggcattaccaaagttgtcggcaccgaagcgcgtggcttcttgtttggcgctccggtagctctgggtctgggcgttggctttgtaccggtccgtaaaccgggcaaactgccgcgtgaaaccatcagtgaaacttacgacctggaatacggcaccgatcagctggagatccacgttgatgccatcaaaccgggcgacaaagttctggtggtggacgacctgctggcaaccggcggcactatcgaagcgaccgttaaactgatccgtcgtctgggtggtgaagtggctgacgctgcgttcattatcaacctgttcgatctcggcggcgaacagcgtctcgaaaaacagggcattaccagctacagccttgtcccgttcccgggccattaattatcgccagtcttgtgctgcccacgctacggacagcacaagatgtgcattcagcctcgccgttctgacggggctgtgttagcattaccccttcgtgaatccaccttccagcgtttcagagcctgccaatgagttatcaggtcttagcccgaaaatggcgcccacaaacctttgctgacgtcgtcggccaggaacatgtgctgaccgcactggcgaacggcttgagcttagggcgtattcatcatgcttatcttttttccggcacccgtggcgtcggaaaaacctctatcgcccgactgctggcgaaggggctaaactgcgaaaccggcattaccgcgacgccgtgcggcgtgtgcgataactgtcgtgaaatcgagcaggggcgctttgtcgatctgattgaaatcgacgccgccagccgcaccaaagttgaagatacccgcgacctgctggataacgtccagtacgctccggcgcgtggtcgtttcaaagtttatctgatcgacgaagtgcatatgctgagccgccacagctttaacgcactgttaaaaacccttgaagagccgccggagcacgttaagtttctgctggcgacgaccgatccacagaaattgccggtgacgattttgagtcgctgtctgcaatttcatctcaaggcgctggatgtcgagcaaattcgccatcagcttgagcacatcctcaacgaagaacatatcgctcacgagccgcgggcgctgcaattgctggcacgcgccgctgaaggcagcctgcgagatgccttaagtctgaccgaccaggcgattgccagcggtgacggccaggttagtacccaggcggtcagtgcgatgctgggtacgcttgacgacgatcaggcgctgagcctggttgaagcgatggtcgaggccaacggcgagcgcgtaatggcgctgattaatgaagccgctgcccgtggtatcgagtgggaagcgttgctggtggaaatgctcggcctgttgcatcgtattgcgatggtacaacttagccctgctgcacttggcaacgacatggccgccatcgagctgcggatgcgtgaactggcgcgcaccataccgccgacggatattcagctttactatcagacgctgttgattggtcgcaaagaattaccgtatgcgccggaccgtcgcatgggcgttgagatgacgctgctgcgcgcgctggcattccatccgcgtatgccgctgcctgagccagaagtgccacgacagtcctttgcacccgtcgcgccaacggcagtaatgacgccaacccaggtgccgccgcaaccgcaaagtgcgccgcagcaggcaccgactgtaccgctcccggaaaccaccagccaggtgctggcggcgcgccagcagttgcagcgcgtgcagggagcaaccaaagcaaaaaagagtgaaccggcagccgctacccgcgcgcggccggtgaataacgctgcgctggaaagactggctagcgtcaccgatcgcgttcaggcgcgtccggtgccaagcgcgctggaaaaagcgccagccaaaaaagaagcgtatcgctggaaggcgaccactccggtgatgcagcaaaaagaagtggtcgccacgccgaaggcgctgaaaaaagcgctggaacatgaaaaaacgccggaactggcggcgaagctagcggcagaagccattgagcgcgacccgtgggcggcacaggtgagccaacttagcctaccaaaactggtcgaacaggtggcgttaaatgcctggaaagaggagagcgacaacgcagtatgtctgcatttgcgctcctctcagcggcatttgaacaaccgcggtgcacagcaaaaactggctgaagcgttgagcatgttaaaaggtagtacggttgaactgactatcgttgaagatgataatcccgcggtgcgtacgccgctggagtggcgtcaggcgatatacgaagaaaaacttgcgcaggcgcgcgagtccattattgcggataataatattcagaccctgcgtcggttcttcgatgcggagctggatgaagaaagtatccgccccatttgatcgtaagcacagcttacgttcgtcatccttaacgtgattgagagagaaacctatgtttggtaaaggcggtctgggtaacctgatgaagcaagcccagcagatgcaagaaaaaatgcagaaaatgcaggaagagatcgcgcagctggaagtcaccggcgaatctggcgcaggtctggtaaaagtgaccatcaacggtgcacacaactgccgtcgcgtagagatcgacccgagcctgctggaagacgacaaagagatgctggaagacctggtggctgcagcattcaacgacgcagcacgtcgtattgaagaaacgcagaaagaaaaaatggcctctgtatcctccggaatgcagctgccgcctggctttaagatgccgttctgatgcaaaccagcccgctgttaacacagcttatggaagcactgcgctgtctgccgggcgttggcccgaagagcgcgcagcgtatggcgttcacgctgcttcagcgcgatcgtagcggcgggatgcgtctggcgcaggcgctcacccgggcgatgagcgaaatcggccactgcgccgattgccgcactttcaccgaacaggaagtctgtaacatctgtagcaatccgcgtcgtcaggaaaacggtcaaatctgcgtggtggagagtccggcggacatctacgccattgagcagacggggcagtttagtggtcgttattttgtgttgatggggcatctgagtccgctggacggcatcggtccggatgatatcgggcttgatcgtctggaacagcgtctggcagaggaaaaaatcactgaagtgatcctcgccaccaaccccacggttgaaggtgaagctaccgctaactacattgccgagctttgcgcgcaatatgacgtggaagccagccgaatcgctcatggcgttccggttggcggcgagctggaaatggtcgacggcaccacgttgagtcactcccttgccgggcgtcataagattcgtttttaagcaaacgagagcaggatcacctgctctcgcttgaaattattctcccttgtccccatctctcccacatcctgtttttaaccttaaaatggcattattgaggtagacctacatgaaaggacaagaaactcgtggttttcagagtgaagtgaaacagcttctgcacctgatgatccattctctctattccaataaagaaatcttcctgcgtgagcttatctctaacgcctccgatgcggcggacaagctgcgtttccgtgcgctctctaacccggacctgtacgaaggtgatggcgaactacgcgttcgtgtctctttcgataaagacaagcgtacgctgaccatctccgataacggcgtggggatgacccgcgacgaagtgattgaccatctggggactatcgctaaatccggtaccaaaagtttcctcgaatccctgggttctgaccaggcgaaagacagccagctgatcggtcagtttggtgttggtttctactctgcgtttatcgtggccgacaaagtgaccgtgcgtactcgcgcggcaggcgaaaaaccagaaaatggcgtcttctgggaaagcgctggcgaaggtgaatacaccgttgccgacatcaccaaagaagatcgtggtactgaaatcaccctgcatctgcgtgaaggcgaagacgagttcctcgatgactggcgcgtgcgttccatcatcagcaaatactccgaccatatcgcgctgccggtagagatcgaaaaacgcgaagagaaagacggcgaaaccgttatctcctgggagaaaatcaacaaagcgcaggcgctgtggactcgtaacaagagcgaaatcaccgatgaagagtacaaagagttctacaaacacatcgcccacgactttaatgatccgctgacctggagccacaaccgtgttgaaggtaagcaggagtacaccagcctgctgtacatcccgtcccaggctccgtgggatatgtggaaccgcgatcataaacacggcctgaaactgtatgttcagcgtgtgttcatcatggacgacgcagaacagttcatgccgaactatctgcgcttcgtgcgtggtctgattgactccagcgatctgccgctgaacgtttcccgtgaaatcctccaggacagcacggtaacgcgtaacctgcgcaatgcgctgaccaagcgtgtgctgcaaatgctggaaaaactggcgaaagacgacgcggaaaaataccagaccttctggcaacagtttggcctggtactgaaagaaggtccggcggaagatttcgctaaccaggaagcgatcgccaaactgctgcgttttgcttctacccataccgattcttctgcgcagaccgtatctctggaagactacgtttcccgcatgaaagaagggcaggagaaaatctactacatcaccgcagacagctatgcggcagcgaagagcagcccgcacctggaactgctgcgtaagaaaggcatcgaagttctgctgctttccgaccgcatcgatgagtggatgatgaactatctgactgagttcgacggtaaaccgttccagagcgtgtctaaagttgacgagagccttgaaaaactggctgacgaagttgatgagagcgcgaaagaagcggagaaagcactgactccgttcatcgaccgtgtgaaagccctgctcggcgagcgcgtgaaagatgtccgtctgactcaccgtctgaccgatacgccagcgatcgttagcaccgacgcggacgaaatgagcactcagatggcgaaactgttcgctgcggcgggccagaaagtgccagaagtgaaatacatcttcgaactgaacccggatcacgtactggtgaaacgtgcggcagatactgaagatgaagcgaagttcagcgagtgggtagaactgctgctggatcaggcgctgctggcagaacgcggcacgctggaagatccgaacctgtttattcgtcgtatgaaccagctgctggtttcctgatgtaatgccggatgaccttcgtgtcatccggcatttttcttttcatcatctgcactttccgcaaattatctcgccattaaccgtttcagccccaggtgcctttcttgaggcaatcgcctgttggtggtatcgtttatcgctttttcaaaaaattcgacacattttaaggggattttcgcaatgcgtatcattctgcttggcgctccgggcgcggggaaagggactcaggctcagttcatcatggagaaatatggtattccgcaaatctccactggcgatatgctgcgtgctgcggtcaaatctggctccgagctgggtaaacaagcaaaagacattatggatgctggcaaactggtcaccgacgaactggtgatcgcgctggttaaagagcgcattgctcaggaagactgccgtaatggtttcctgttggacggcttcccgcgtaccattccgcaggcagacgcgatgaaagaagcgggcatcaatgttgattacgttctggaattcgacgtaccggacgaactgatcgttgaccgtatcgtcggtcgccgcgttcatgcgccgtctggtcgtgtttatcacgttaaattcaatccgccgaaagtagaaggcaaagacgacgttaccggtgaagaactgactacccgtaaagatgatcaggaagagaccgtacgtaaacgtctggttgaataccatcagatgacagcaccgctgatcggctactactccaaagaagcagaagcgggtaataccaaatacgcgaaagttgacggcaccaagccggttgctgaagttcgcgctgatctggaaaaaatcctcggctaattcgaaagcgcgcacggacagtcccctcgccccctcggggagagggttagggtgaggggaacaggcccgcacaagcaaacttatcagcaatctcaggccggatattcattcggccttttacaaaaacctcaatctgcgctattcctttttctgatttgacctctcacagcaattagttcttcttcctcacttttccgctacaattatcaacaagttgaatcgataagaggcggtaatgcgtcagactaaaaccggtatcctgctggcaaacctgggtacgcccgatgcccccacacctgaagcggtaaaacgctatctgaaacaatttttaagcgacagacgcgtggttgataccagtcggttgttatggtggccattgctgcgcggcgtgattttgccgctgcgcagcccgcgtgtggcgaagctgtatgcctctgtctggatggaaggtggcagcccgctgatggtttacagccgccagcaacagcaggcgctggcacaacgtttaccggagatgcccgtagcgctgggaatgagctacggcagcccaagtctggaaagcgccgtagatgaactcctggcagagcatgtagatcatattgtggtgctgccgctttatccgcaattctcctgttctacggtcggtgcggtatgggatgaactggcacgcattctggcgcgcaaacgtagcattccggggataagctttatacgtgattacgccgataaccacgattacattaatgcactggcgaacagcgtacgcgcttcttttgccaaacatggcgaaccggatctgctactgctctcttatcatggcattccccagcgttatgcagatgaaggcgatgattacccgcaacgttgccgcacaacgactcgtgaactggcttccgcattggggatggcaccggaaaaagtgatgatgacctttcagagccgctttggtcgggaaccctggctgatgccttataccgacgaaacgctgaaaatgctcggagaaaaaggcgtaggtcatattcaggtgatgtgcccgggctttgctgcggattgtctggagacgctggaagagattgccgagcaaaaccgtgaggtcttcctcggtgccggcgggaaaaaatatgaatatattccggcgcttaatgccacgccggaacatatcgaaatgatggctaatcttgttgccgcgtatcgttaaagctgagcggtaaagaactgagcgccgtcgcgaagagcctcgtcggcggttttcatcatccgactataatgcaaaaaggcgtgcagcgtgcctgggtagagtttgaactcacagggctgctgatgcgccgctaacgtctggtaaagcagacggctgtcatccagcagcggatcgaactccgccccggcaataaaacagggcggaacttcgcgagtgagatcattattaaacagacagtaatacgggctctcgcggtccgcgtcgttgcttaaatatgcctcttcgtacatctgcaaatcctgttgcgttaagccatcccagacaccgcccaacagacgacgagtcacggaatcccgtaatccgtaaagcccataccacagcaaaacgcccgcaactttaccgcaatcgatctgtttatcacgcaaccacaacgcactggcgagcgccagcatggcacctgcggaatcaccggcaaagccaatgcgggacatattgatttgataatcctccgcctgctggtggaaataacaacaagcagccacaatttcctctatcgcttgcggaaaacgcgcttcaggactaagggtgtaatcaataccaatcaccgtacattggctgtagcttgccagcaggcgcatgatgcgatcgtgggtatcgagattgccgagaataaaaccgcctccatgcaaataaaatagcgtcgctgggctatctggctgcggacaaaagagacgtgtttccacctgcccatattttgttggaaccatgtaagctctggttgccatttctggagcgcccgcattccagaatcggcgctcaagcgtgtaatactgtcgttgctcagcaatcgttcccgttgcgggccagggcggtaaatccggctgaagagtattcacaacggtcttcatttcagcagaaataaggtccagaacaggtagtttgttttccggcttcatacaaaaactcctttcaaattacgtcattgtaaggaaccactgccatgaaaatgcgatcccgcctgctgatattgaaactggctgcgtctcgcgcgctcccgtcagattgtgttaacattcgccgctcagttaaccacccgtaaaaacaaccatgaaatttcccggtaaacgtaaatccaaacattacttccccgtaaacgcacgcgatccgctgcttcagcaattccagccagaaaacgaaaccagcgctgcctgggtagtgggtatcgatcaaacgctggtcgatattgaagcgaaagtggatgatgaatttattgagcgttatggattaagcgccgggcatagtctggtgattgaggatgatgtagccgaagcgctttatcaggaactaaaacagaaaaacctgattacccatcagtttgcgggtggcaccattggtaacaccatgcacaactacagcgtgctcgcggacgaccgtagcgtgctgctgggcgtcatgtgcagcaatattgaaattggcagttatgcctatcgttacctgtgtaacacttccagccgtaccgatcttaactatctacaaggcgtggatggcccgattggtcgttgctttacgctgattggcgagtccggggaacgtacctttgctatcagtccaggccacatgaaccagctgcgggctgaaagcattccggaagatgtgattgccggagccagcgcactggttctcaccagttatctggtgcgttgcaagccgggtgaacccatgccggaagcaaccatgaaagccattgagtacgcgaagaaatataacgtaccggtggtgctgacgctgggcaccaagtttgtcattgccgagaatccgcagtggtggcagcaattcctcaaagatcacgtctctatccttgcgatgaacgaagatgaagccgaagcgttgaccggagaaagcgatccgttgttggcatctgacaaggcgctggactgggtagatctggtgctgtgcaccgccgggccaatcggcttgtatatggcgggctttaccgaagacgaagcgaaacgtaaaacccagcatccgctgctgccgggcgctatagcggaattcaaccagtatgagtttagccgcgccatgcgccacaaggattgccagaatccgctgcgtgtatatagccacattgcgccgtacatgggcgggccggaaaaaatcatgaacactaatggagcgggggatggcgcattggcagcgttgctgcatgacattaccgccaacagctaccatcgtagcaacgtaccaaactccagcaaacataaattcacctggttaacttatagtagcttagcgcaggtgtgtaaatatgctaaccgtgtgagctatcaggtactgaaccagcatagtcctcgtttaacgcgcggcttgccggagcgtgaagacagcctggaagagtcttactgggatcgttaagttatcgtcggttcgtaggccagataaggcgttcacgccgcatctggcatttggctctcgatgcctgatgcgacgctggcgcgtcttatcatgcctacatatttttcatattttacatccggcaaccaccgtttaccccgtcaccacctcacccgccggtggcgtttccagcagttccagcatggtacgggcgatttcacgctcgcccatcactacctgattcgcaccacgttcggtgatatacgccacttcatcgtcataatgggcgcgggcaataatctcaatatccggatttttcgcgcgggcagatgccacaatctcacccgcttcataaccgttgggaatcgtcaggatcagccattttgcacattccagatgcgccagttgcataatttcttcgttcgccgcattgcccaatactgcgcggaccccgcgctctcgcagctcatcaacacgggttcgactcgtctcaatcaccaccagcggaatatcagaggcgagcaatttctcccccagcaggctgcctacacgaccgtaacccaccagtagcgcatggttgcaaatatccactgggatctgcttctcttcttcgattgcctcttccagcgtctgctcttccagcgtttcggtcttcgccagatatttctccagtagtgcgaacagtaccgggttgagcataatgctcaggatcgcccctgccagtaccaggttttgtccggcctgcggcagtaaattcaatgccattcccagtcccgccaggataaacgcgaactcaccaatctgcgccaggctggcggcgatggttaatgccgtacgttgggagtgaccaaacagtcgcaccaggaaaaatgcggctaagctcttaccaaacagaataatcgccagcgtcgccagcactgccagcggttgctgaatcagaattaacggatcaaacaacatcccgacggagacaaaaaacagcaccgcaaacgcgtcgcgcaatggcagcgtatcgtgggcggcacggtgactcagttcagactcgttcagtaccatcccggcaaagaacgcaccgagtgcaaaggagacatcaaacagctctaccgcaccaaaggcaacccctaacgccagcgccagcacgctcagggtaaacagctcgcgagaaccggttgccgcgctgcgtgccataatccacggcaccagacggcgacctaccagcatcataatggcgataaatgcgatcactttgccgatggtgatccccatatcgactgcaagagtggcaaagcccacatcgccctgttccatcattcctgccactgcgggcagcaacaccagcgtcagaaccattaccaggtcttccacaatcaaccaaccgatggcgatttgcccacgctgactgtcaattaattgccgttcttcaagtgcgcgcagtaacaccacggtactggcggtggaaagacataaaccgaacacgataccggtcattaagctccagcccagcacggcagagagcgccatacccagcagcgtcgccacggctatctgggcgatcgcaccgggaatggcgatggcctttaccgccatcaaatccttcaggctaaagtgcaaaccgacgccaaacatcaacagaatgacgcccagttcagccagttccggggcaagcttggtatcggcaacaaagcccggagtgaatggtcctgccagcacacccgctaacagatatcccaccagaggagaaatacgtagtttattggccagcatgccgaggataaaggcgagcacaaggccgccaacaatggtggtgataagcggggtggcgtgatgcattccgtctccttttcctggtggttattgtccatttttggccgggaaaaccaaaattacaggtaatagtttatgacaatttcattgatgatgttcatgaataattattgaattttgcagaaaaatggaattagctgcaaaaaaagcacggatcggaaaacagaaggcggtttaacagaggaaaggcttatggcgactgtaaaacgatgcagccaaagtttgcctttggctgcaatgaaatcagtctttatgccggttatcaggcaggaatatggtcaacatccccaatagtggcaggaaagcacagattttatagactaactcgatgctggtgtgatcggcgataagccccagaactgccgctcccagacctcccatgccaaaagcaaaaccgaaaaagagtccagaaaccataccgatacgtcctggaagcagctcctgagcgtagaccagaatggcagagaatgcgctagcgaggataaatccaataatcaccgttaaaacccccgtccagtgcaggctggcgtagggtaaaatcagcgtaaacggcgcaacgccgaggatagagccccaaatcacatatttccgcccaattttatcccctacaggcccgccgatcaccgtacctgccgcaacggcaaacaggaaggcaaacagatgaagctgagcattctggatagataatccgaatttttgcatcagataaaaggtgtaatagctgctgatgctcgccatatagaaatatttgctgaaaatgaggattaacagaatgctgaccgccagtacaactttattgcgcggcagtggattgataatcgtcgctttgggttttcctttattcattcggtgctgtgcgctgtaccaacggctgatttgcgccaacaccacgatcgccagcagtgccgcaagcacaaaccaggcaacgttgcctttgccataaggcgcgataatcaccgccgccagcaagggtcccagggaactgccaaagttgccgccgacctgaaagatagattgcgccaggccatgccgcccgccggaagccatacgggccacgcgagaagattccggatgaaagacgctactaccggtaccgaccagcgccgccgccagcagaactgcgccaaaactgcccgccagcgcaagcagcaccagaccgcttaaggtaaagcacatgccaattggcaagctccatggcatcggatatttatcggtccagtagccgaccactggttgcagtaggctagaggcgagctggaaggtgagggttatcatgccaatctgcataaatgtcagagaaaattcactctgaagcagcggataaatcgccagaatcaggctttggatcatgtcgttcagcagatgactgaggctgatagcacctaaaataccaaagcttgttcgggccttggtcgtactcgcagccgcgcccgccacaggctggggttgttcactcattgccataggaaagtcactttttcagggttgcgatgtaaagaatgatcttatttgtgattattaccagactaacatacctgtatgcgtcgtctgaaggaagtctcaacgccgaatacagaatttctaatctggatgcagatttatcttcaccggacgcagacttgtctatgatgtcgcgtcatactatttttcaacacgttgaaatcaggtcagggagagaagtatgaaattattgcagcggggcgtggcgttagcgctgttaaccacatttacactggcgagtgaaactgctctggcgtatgagcaggataaaacctacaaaattacagttctgcataccaatgatcatcatgggcatttttggcgcaatgaatatggcgaatatggtctggcggcgcaaaaaacgctggtggatggtatccgcaaagaggttgcggctgaaggcggtagcgtgctgctactttccggtggcgacattaacactggcgtgcccgagtctgacttacaggatgccgaacctgattttcgcggtatgaatctggtgggctatgacgcgatggcgatcggtaatcatgaatttgataatccgctcaccgtattacgccagcaggaaaagtgggccaagttcccgttgctttccgcgaatatctaccagaaaagtactggcgagcgcctgtttaaaccgtgggcgctgtttaagcgtcaggatctgaaaattgccgttattgggctgacaaccgatgacacagcaaaaattggtaacccggaatacttcactgatatcgaatttcgtaagcccgccgatgaagcgaagctggtgattcaggagctgcaacagacagaaaagccagacattattatcgcggcgacccatatggggcattacgataatggtgagcacggctctaacgcaccgggcgatgtggagatggcacgcgcgctgcctgccggaagcctggcgatgatcgtcggtggtcacagccaagatccggtctgcatggcggcagaaaacaaaaaacaggtcgattacgtgccgggtacgccatgcaaaccagatcaacaaaacggcatctggattgtgcaggcgcatgagtggggcaaatacgtgggacgggctgattttgagtttcgtaatggcgaaatgaaaatggttaactaccagctgattccggtgaacctgaagaagaaagtgacctgggaagacgggaaaagcgagcgcgtgctttacactcctgaaatcgctgaaaaccagcaaatgatcagcctgttaagtccgttccagaacaaaggcaaagcgcagctggaagtgaaaataggcgaaaccaatggtcgtctggaaggcgatcgtgacaaagtgcgttttgtacagaccaatatggggcggttgattctggcagcccaaatggatcgcactggtgccgactttgcggtgatgagcggaggcggaattcgtgattctatcgaagcaggcgatatcagctataaaaacgtgctgaaagtgcagccattcggcaatgtggtggtgtatgccgacatgaccggtaaagaggtgattgattacctgaccgccgtcgcgcagatgaagccagatagtggtgcctacccgcaatttgccaacgttagctttgtggcgaaagacggcaaactgaacgaccttaaaatcaaaggcgaaccggtcgatccggcgaaaacttaccgtatggcgacattaaacttcaatgccaccggcggtgatggatatccgcgccttgataacaaaccgggctatgtgaataccggctttattgatgccgaagtgctgaaagcgtatatccagaaaagcagcccgctggatgtgagtgtttatgaaccgaaaggtgaggtgagctggcagtaatccgaaagtgccggatgtttgcatccggcacaatgcttaatcgcggcgggcgatatcagcaaatttggcatcgaggatctttgccagatcgcctgccgccagttcgatatccagtccgcgcttgccgccggaaacataaatagtggcaaattcttgtgcgggggcgtcgataatcgttggcagacgttttttctgccccagtgggctaatccccccaaccaggtatcccgtgctacgctgcgcgaccatcggatcggccatctcaactttcttggcacccagcgcttttgctacttttttaagatccagttgacctgcgaccggcgtaacggccacggcaaggtgtttcatatcaccgttcactgccaccagcagcgttttgtagacctgatccggattcaaacctaattttttgacgacttcatcgccaaaattggtttcagccggatcgtgctcgtaggtatggatttgaaagctaatcttgtttttttcgagtaatttaactgcgggtgtcatggtaattttcctgccttaaacaaaaaaacgaagcaagcatacgcctgatggcggtccaaaaaaaagagtcatcttgcctaagagtattggcaggatggtgagattgagcgacaatcgagttacaccgtcgcttaaagtgacggcataataataaaaaaatgaaattcctctttgacgggccaatagcgatattggccatttttttagcgcaacatttgcggcaaattcccttctccatacaggtgtagtgcaccgaccgcgaccacatatcgccccggcggcatggcgcgtaatttatcccgccaggcgagatttcgctgatgcatcagcacatcgtacaggctctgactgaacgtattgggcagcgttatatcattattttgcggcggtgcattcagccaccagctcatcatttgttgcagcaaccgtgcgttggtatgccagtgggtcagcgtatcgtccagcagcgccagtcctttgtcagggagctggagcaacatggcaatctggttttcagccccttccagttcaatcacgggtttatgttgttgcttcgccgcctgcaatagctggtaatcgataccgtattctgcccgcagccccagtttttgtgcctgcgtcgcctgaagaaccatcgcgatttgccacagcggttgggtagaaaagagactgggagaaatgcccatctcctggctaatgtgctgcaggttttggagttgctcctcgctaatgcgctcttccagcgcctcgcaggcaggcaaattagcaaaaggcgtatcgctggtggaaacatccgcctcgacgatcagcgcatcggcgtttttgagctttttgagcaaacgggtgggcaggggagccatatcgtggctacccatatgaatactgccaatcagatgaaaatggcgattgccggggagggtgatatcgatggcaggccaggtgtaatgattaccgcgcagcgcggcccaaagcgtttttacccggtacaacagatccatacgacctccctttgtgaaatatcatgctagcgcgcggtgagggatggcgcaaatggagttggagacttgtttaatgtgtttgtatgattcagtatgttcttgcatcgctattcacaaggaagcaacagttaaaaaccatgaaacaggcaacaagaaaaccgacgacacccggagatattcttctctatgaatatctggaaccgctcgatttgaaaatcaatgagttagcagagttgctgcatgttcatcgtaatagcgtcagtgcactgatcaataacaatcgtaaactcactactgagatggcatttcgtctggcgaaagtttttgataccacagtcgatttttggctaaacctccaggcggcggttgatctttgggaagttgaaaacaacatgcgcacccaggaagaattgggacggattgaaacagtggctgaatatttggcacgccgtgaagagcgtgcaaaaaaggtcgcgtaaggccaaaacatcgcttcatctcgtaggccggataaggcgttcacgccgcatccggcatccgagcaccattgcctgatgcgacgcttacccgtcttatcaggcctacaaacttgtgcctgaaccgtaggccggataaggcgtttacgccgcatccggcatccgagcaccattgcctgatgcgacgcttacgcgtcttatcaggcctacaaacctgtgcctgaaccgtaggccggataaggcgtttacgccgcatccggcagtcatgcgtcgatgccaaatgcgccaccctaaagcagcgcatccgcaatgatgtacttattccttcggtttaaaccgcagcaaccggttggcgttactcactacggtaatgctgctgagcgccattgccgctccggcaactaccgggttaagcagtgttccagtgaacggccacaaaataccggcggcgaccggaataccgatactgttgtagataaacgcaccgagcaggttctgcttcatgttgtgcagcgttgcgcgggaaatagcgagcgcatccgcaacgcccatcaggctatggcgcatcagggtaatcgccgcggtttcaatggcaacatcactgccgccacccatcgcaatgccgacatccgcctgagccagcgctggcgcgtcgttaatgccgtcgcccaccattgccacctaacgtccttcactttgcagatgtttgatcgcttcggctttaccgtccggcagcaccccggcgatcacctcatcaatccctgcttctttggcgatcgcattggcggtggttgggttatccccggtcaacatcaccagacgatatcccgctttatgcaggcgttgcagcgccgccacgctatcactacgcaacggatcgcgtactgccagcagggctaccgctttcccgtcaaccgccagcagcacaggcgttgccccttggcttgcctgagcagtaatctccgcttcgatagctttggtaccaacctgttgctcatttaacagcgcctgattgcccagcaataacgcatgaccttcagcttcaccgctcacgcccagcccgcgcaatgtgcggaaaccgttgacctgcggtagctgcatatcacctgctttatcgaggatcgctcgtgccagcggatggctggaaccttgctccagtgccgccgccagacgcaatgcctgcgcttcatcaacatcagcaaatgttttcactgcgacaacctgcggcttcccttcagtcagcgtcccggttttatcgaacactacagtgtcgagtgtactggcgcgttgcagcgcgtcagcgtcccgcaccagcacgccaaactcagccgcccgcccgacgccggaaataatgctcatcggcgtcgccagccccagcgcacacggacaggcaataatcagtaccgtggtggcaatcaccagggtatagacaatctgcggtgccggaccaaagaaataccagattgccgcactgacaagcgcaataaccaccactaccggcacaaatacggcactgattttatccgccagctgaccgatttctggcttgctgctctgggcctggcgcaccatgcgaatgattcgactcagcgtagtatggctgccaaccgcactggcacgaaacagcacactgccgtcctgtaccactgtcccggcatggacgctatcgccttcgcctttttgctgcgggattggttcgcccgtcagcatcgcttcatccagccatgcttcgccctgggtaatctcgccatctaccggcacgcgatcgccggtcgtcaggcgcagcaacatacctggctgcacttctgccagaggcacgcttttttcaccttcgtcagtaaccaggcgtgccgtcggcggggttaaatcgagtaacttttccagcgccttagaagaacgctggcgtgcgcgcgcttccagcatatggccgagattgatcagaccgataatcatcgcgctggcttcgtaataaagatgtcgcgcttccatcgggaaccactgcggccacaggttgacgctcatgctatagagccacgccacgccagtacccagcgccaccagcgtatccatcgtcgccgcaccgttcagcaggcttttccatgcactgcggtaaaaatggccgccggcgaaaaccatcactgccagggttatcaggccgataaccaaccacaggctgcggttgtcagcggtgaccatcatgttatcgccgatcatcccccagaccatcaccgggatacccaccgccagtgcgacaattgcctgccagcggaagcgcttcatcgtagcgacggcggtttcttgctggcgctcgcggcgtttagcgtcatcttcaatcgcttccgcgccgtagcccgctttttccaccgcctgcactaaatcttgtggggaggcactgcccatcaccagcgcagtacgctccgccaggtttacccgtgcctgagtgacgcccggtacgctttgcagcgcattttgtacgcgggtgacacagctggcgcagctcatgccgctcagcagcaactgctggctgtcatcgtcatcggcggtcgctgccggaagcgcctcagaaaccgctgtcagtgcttcgctcgggatactactctccgccagcggtttagcctttgggtggcttacagatgcgtcataacccgcttgtttgatggtttcgatcagctgttctgcactggcagtcccggtaacgtgcgcttcagtgatagacacatccgcctgctcaacatccggacgctgttcaagactttctttcacgcgtttaacgcagtgaccgcaggacaggccgtccagggtcaggtcgatagtttgactcataaaacactcctttaagacagttttgactggctgtgataaaggttaaaccttccagcaaggggaaggtcaagaaattaataaaccaggcgggtaaaagtccgtaaagattaaaaaatcggctcgatttgcatcaggattagacatttatctctttgttttcctgtagttaagttgcgggtgctaagttaaatcaggatgcctgaaaatcggcaccggggtgaggaattacctcccgcatctataaaaaggagttaacaaaagatgttagatgcaaacaaattacagcaggcagtggatcaggcttacacccaatttcacagtcttaacggcggacaaaatgccgattacattccctttctggcgaatgtaccaggtcaactggcggcagtggctatcgtgacctgcgatggcaacgtctatagtgcgggtgacagtgattaccgctttgcactggaatccatcagcaaagtctgtacgttagcccttgcgttagaagatgtcggcccgcaggcggtacaggacaaaattggcgctgacccgaccggattgccctttaacagtgttatcgccttagagttgcatggcggcaaaccgcttagcccactggtaaatgctggcgctattgccaccaccagcctgattaacgctgaaaatgttgaacaacgctggcagcgaattttacatatccaacagcaactggctggcgagcaggtagcgctctctgacgaagtcaaccagagcgaacaaacaaccaacttccataaccgggccatagcctggctgctgtactccgccggatatctctattgtgatgcaatggaagcctgtgacgtgtatacccgtcagtgctccacgctcctcaatactattgaactggcaacgcttggcgcgacgctggcggcaggtggtgtgaatccgttgacgcataaacgcgttcttcaggccgacaacgtgccgtacattctggccgaaatgatgatggaagggctgtatggtcgctccggtgactgggcgtatcgtgttggtttaccgggcaaaagcggtgtaggtggcggtattctggcggtcgtccctggagtgatgggaattgccgcgttcagtccaccgctggacgaagatggcaacagtgttcgcggtcaaaaaatggtggcaagcgtcgctaagcaactcggctataacgtgtttaagggctgatcatgatgaacacggaaggtaataacggtaacaaacctctcggtctatggaacgtcgtttccatcggcattggggcaatggtgggggcggggatcttcgcgctgctggggcaggctgcattgctaatggaagccagcacctgggtcgcctttgcttttggcggtattgtggcgatgttttccggttatgcctatgcgcgtctgggggcgagctatcccagcaatggcggcattatcgacttctttcgtcgcggattaggcaacggcgtctttagcctggcgctcagcttactgtacctgttgacgctggcggtgagcatcgccatggtcgcccgtgcttttggcgcttatgccgtgcagtttttgcatgaaggcagccaggaggagcaccttattttgctctacgcgttggggatcattgcggtgatgacgcttttcaactccttaagcaaccatgcggtagggcggctggaagtgatcctcgtcggcattaaaatgatgatcctgttattgctgattattgccggtgtctggagcctgcaaccggcgcatatttccgtctctgcgccccccagctccggtgcgttcttctcctgtattgggataactttccttgcctatgcgggctttggcatgatggcgaacgcggcggataaagtgaaagatccgcaggtcattatgccacgggcgtttctggtggcgattggcgttaccacgttgctttatatcagcctggcactggttttgcttagcgatgtaagcgcattagagttagaaaaatatgccgataccgccgtagcgcaggctgcttctccgctgctcgggcatgtgggttatgtgatcgtcgtcatcggcgctttactggcgacggctagtgccattaacgcgaacctgttcgccgtgtttaacatcatggacaacatgggcagcgaacgcgaactgccgaagctaatgaataaatccctgtggcggcagagtacctggggcaacattattgtcgtggtgttgattatgctgatgacggcggcactgaatttaggcagtctcgccagcgttgccagcgccacctttttgatttgctacctggcggtgtttgtggtggcgatccgcctgcgtcatgatattcacgccagcttgccgattcttatcgttggtacgttggtgatgttgttggtgatcgttggctttatctacagtctgtggtcccagggtagccgtgcgttgatatggattattggcagtctcttactcagccttattgtggcaatggtcatgaagcgcaataaaaccgtataacatctctctgtgcgcagtacttcctgtattattgtggtggcggtcgatattcgcactggcaaaaaaacgtgcttgaatatctgttgaaaccctttaacaaagcacaggaggcgttgcgcgaacgatgaacatcagcgatgtagcaaaaattaccggcctgaccagcaaagccattcgcttctatgaagagaaggggctggtgacgccgccgatgcgcagcgaaaacggttatcgcacctacacgcagcagcatctcaacgaactgaccttactgcgccaggcacggcaggtgggctttaacctggaagagagcggcgagctggtgaatctgtttaacgacccgcagcggcacagcgccgacgtcaaacggcgcacgctggagaaggtggcggagatcgaacgacacattgaggagctgcaatccatgcgcgaccagctgctggcactggcgaatgcctgccctggcgatgacagcgccgactgcccgattatcgaaaatctctccggctgctgtcatcatcgggcagggtgattaagagctgacggctcggatatgtagggttatcccttctatcgcaatgacttcaacatgcgtacctgcaccgagatcctcgctggcgctgacaggccaactactgtcaccgacgcgcatatgaccgcgcccgttgaccagcggagattccagcacaaaacgtcggccaatcagctgctgcccgcgctggtttaaatgactatcgctgtgcttttgttcgcgcacccgccggctcaaccatttccaccacagccaggcggcgagcagcgtcaggatggcaaacattaccccttgccactcccaacccagcggcaccagccagaccaccaggccggtaatcaccgctgccacgccgctccacaacaaataaccatttccgcccagcatctcggctgccagcagcaaaccgccgagactgagccagaaaatatgtggatgaacgaccattaactccatcatggctgagtccgtttgttggcgctgtctttcaccagctcggcaatcccggcaatgctccccatcaggctgctggcctctaatggcatcatcactactttgctgttactggaggaaccgatctgctgtaacgcttcggtgtatttctgcgctacgaagtagttcaccgcctgaatatcaccggaggcgatagcttcagacaccattttggtggcgcgggcttctgcttcggcggaacgttcacgcgcttcagcctgtaaaaacgcgctctgacgttcgccttccgctttcaggatttggctctgtttttcaccttcggctttgaggatttccgcctgacggatcccttccgcttcaagaatgtaagcgcgtttggtacgttccgctttcatctgcgcgttcatactagagataagctctgccggtgggcgcacgtcgcgaatttcaatacgggtgactttaatcccccacgggttggtggcttcatcgacaatacgcagcaggcgactgttgatgctgtcgcgctgagagagcatttcgtcaagttccatactacccagcacggtacggatgttagtcatggtcaggttgatgatcgccagctccagattgctgacttcataagccgcgcgcggcgcgtcaatcacctgaataaagcacacggcgtcgatggtaacgttggcgttatctttgctgataacttcctgggaagggatatcgagcacttgctccatcatattgatcttgcgaccaatgcgatccataaacggcaccaccagactgagccccggctgtaacgttttggtatagcgaccaaagcgttctactgtccactgatagccctgcggtacgattttgacacccgcgccgacaatgaccagcgcgacaaaaatgagaatcgggataaagataagcatcggaaaaacctcctgttgtaccgtccataatcagcaaaattgctgcttgattaaacaaattatacctgattactgaaagagagttcccccttattcctgcgaaggataaactgtttttagtaaaaatcagaaaaagggaacagcgatgcaggaaaatagtcctttgcttcagctacaaaacgtaggatatctggcgggtgatgcgaagattcttaataacatcaattttagcctgcgtgctggcgaatttaagttaattaccggtccttctggttgtggcaaaagtacgctgctaaaaatagttgctagtttgatcagcccaaccagcggaacgttactgtttgaaggtgaggatgtcagcacactaaagccagaaatctaccgccaacaagtctcttactgcgcccagacaccgacgctgtttggcgatacggtatacgataatctgatctttccctggcagatccgtaaccggcagcctgacccagccatttttctcgattttctcgaacgcttcgccttgccggacagcattttgacgaagaatatcgccgagctatctggtggtgaaaaacaacgcatcagtttgattcgtaacctgcaatttatgccgaaggttttattgctggatgaaataaccagtgcgctggatgaaagtaataaacataacgtcaatgagatgatccatcgttatgtgcgcgagcaaaatattgccgtgctgtgggtgacacacgataaagacgaaattaatcatgcggataaagtgattacactgcaaccgcatgccggagaaatgcaggaagcacgctatgaactcgcataactaaagaaatgcaggaagcacgctatgaacagccataatattactaacgaaagtttagcactggcattaatgctggtggtggtggcaatcttaattagccataaagaaaaactggcgctggagaaaaatattctctggagcgtcgggcgagcgataattcagctgattattgtcggctatgtgctgaagtatattttcagcgtggatgatgccagcctgacattattgatggtgttatttatctgctttaatgcggcgtggaacgcgcaaaaacgcagtaaatatattgctaaagcttttatcagtagctttattgccattacggtcggggcgggaattaccctggcggtgctgattctcagtgggagcattgaatttatcccgatgcaggtgatccctatcgccgggatgattgccggtaacgccatggtagcggtggggttgtgttacaacaatttagggcaacgggtcattagcgaacagcaacagattcaggagaaactgagtcttggtgcgacgccgaagcaggctagtgcgatattgattcgcgacagtattcgcgcggctttaattccgacggtcgatagtgcaaaaacggttggcttagtgagtttaccaggaatgatgtccgggctgatatttgccgggattgatccggtgaaggcgattaaatatcagattatggtgacctttatgctgctcagtaccgccagcttgagcaccattattgcctgctatttaacctatcgtaagttttataatagccgccaccagttggtggtgacgcaattgaagaagaaatgatgcgatgccggatgcgcagcatcgcatccggcgttgtggttcatgtgccgatcaacggaatatcaatacaacaatgcatacagctggcggcgatacttgctcgccagtgcatcacccgtacccagcgcagcgaggatctcctggaacgttttacgcgtctgaccgtctgcggcggtgagatctttacgcagatgcccgaacagcaactccagcgcctcttcattgcgcccaacctgatgcagttgcagcgccagttgcgtcgccagtgcggcatcttctggattctccgccacctgctgttgcaactgttgaatttccggcgtatcagccgcctgcttcagcagttcgatttgcgccaccagcccctggtagcgggtgtcctgatcctgcaacggaatggttttcagcaccgcttccgcatcttcagaacggttcagcgcaatcagcgtttctgccagcagcaggccgatctccccgttctgattgctcaactgccaggcgtctttcagcaatggcagggcatcggtgtaattgctttcctgcatcagttgcatcgcctgctgcgctttcagctcttcttcgcgcggcagcactttatccagcagggcgcggatcgcctcttccggttgcggcccctggaagccatctaccggttgcccgttctggaacagatacacggtcggaatcgcacgcagaccaaactgcgcggcaatcatctgctccgcgtcgcagtccagcttcgccagaataaattgcccgttgtactgcgccgcgaggctttccagaattggggttaactgcaaacagtgctggctacgttcagaccaaaaatagaacagcaccggagtggtcatgctctgttcaagaacctgttgcaggttagattcgttaatgttgacaatattttctacggacatggagtcgctctctgttgtcgatattttctttgacatgggggcttaagcgcgcgcttcaactcacccctgcaatattttgtccatcacgcgccccggcagcaggcgcttaagcaccattaccgcccaggtcaccagcgtcaccggatagcgcatcttcggcttctcgctaataaaagcatggcgtactttgtccaccaccgcttccggtcccaacgtaaagcgggcggcgatgccgggattttcgactggtttatcactttgcgtctggttgacgttgtcggtgaagcgagtacgaatgggaccgggttcgatcaggctgactttaattccgctgtggcgcagctccatgcgcagtgcatcactccacgcctccagcgcatatttactggccgcgtaagcgccacgacccggcgtggagattaatcccatcacgctacttgtcatcacaatacgcccttcaccgtgcggtaacatcgcgggtaacaggcgcatggtgagctggtgtgcgccgaaaaagttggcggaaaactgctgttccatctgcgcacggctgatggtggaaagggggccatacatgccgaatccggcattgttaaagatcccatacagacaattatcggtcagggcgatcacctcgtcggctgcgcgatcaacactttctggactatccagatcgatcaacacgccggtaaatcccatgctgttcatgcgctcaacatcatccggtttccggcaacctgccagcacatgaaaaccctggcgttttaattcgagcgcgctttccaggccaattccactggaacatccggtaattaagacgcttttttgcataactttacctgtcaggatctccgttgctttatgagtcatgatttactaaaggctgcaacttatttaactgtcatgatttactaaaggctgcaactgcttcgccatccagtcggcaataaacggctgggcgtcgcggttgggatgaataccgtcatcctgcatccattgtggcttgaggtagacctcttccataaaaaagggcagcagcggaacatcaaactctttggcgagtttggggtaaatggcgctaaaggcttcattataacggcgaccatagtttgcaggcagacgtatttgcattaacaatggttcagcgttggcggctttgacatcctgcaaaatctggcgcagcgtttgctcggtttgctgtggctgaaaaccacgcaaaccgtcattgccgcccagttcaaccagcacccaacgcggctgatgctgtttcagcagagccggaaggcgcgccagtccttgttggctggtgtcgccgctgatgctggcattaactacgctcgttttactctgccacttatcattcaacaaggcaggccaggccgcgctggcagacattcgatacccggcgctcaggctatcacccagaatcaataacgtgtccgctgcggcggcacggaaggttaacaggaccaggaacaggaagggcaaatgccagcggaaaacattgttgaagttcatcatcttaagaagtccgtcggtcagggggagcatgaactctccatcctcaccggagttgagctggttgtcaaacgtggcgagaccatcgcactggtgggcgagagcggaagcggtaagagtaccttgctggcgatcctcgccgggcttgatgacggcagcagtggcgaagtgagtctggtgggacaaccgctacataatatggacgaagaagcgcgggcaaagttgcgcgcgaagcacgtcggctttgtttttcagagttttatgttaattcctacccttaacgcgctggaaaacgtcgagcttccggctctgctgcgcggtgagagtagcgcggaaagtcgtaacggggcgaaagcgttgctcgaacagttagggctgggtaaacgtctggatcatcttccggcacagctttccggcggtgaacagcaacgagtggcgctggcacgagcctttaatggtcgacctgatgtgctgtttgccgacgaacccaccggcaaccttgaccgccagacgggcgataaaattgccgacctgctgttttccctcaaccgtgaacatggcaccacgttgattatggtgacccacgacctgcaactggcggcacgctgcgaccgctgcttacggctggtgaacgggcagttgcaggaggaagcatgattgcacgttggttctggcgcgaatggcgtagcccgagcctattaattgtctggctggcgctaagcctggcggtggcctgcgtgctggcgctgggcaatatcagcgatcgcatggagaagggcttaagccagcaaagccgtgagtttatggcgggcgatcgggcgttgcgcagtagtcgcgaagtgccgcaagcgtggctggaggaagcgcaaaagcgcggcctgaaagtcggcaagcagctgactttcgccacaatgacctttgcaggcgacacaccgcagctggcgaacgtcaaagcggtggatgatatctacccgatgtatggcgatctgcaaactaatccccctggcctgaaaccgcaggcgggcagcgtattgctggccccacgcctgatggcactgcttaacctgaaaacgggcgacaccattgacgtgggcgatgccaccttgcggattgccggagaagtgattcaggaaccggattccggttttaaccccttccagatggctccgcgtctgatgatgaatctggcggatgtcgataaaaccggagccgtgcagccggggagtcgggtcacctggcgttataaattcggcggcaacgagaaccagctcgacggctatgagaaatggttgttacctcagcttaaacccgaacaacgctggtacggtctggaacaggacgaaggcgcgctggggcgaagcatggaacgcagccaacagttcctgctgcttagcgcgcttctgaccttgctgctggcagtggcagcggtggcggtagcgatgaatcattactgtcgcagtcgctacgatctggtggcgatcctcaaaacgctgggggcagggcgagcgcaactgcgtaagctaatcgtcggtcagtggttgatggtgctgacgcttagtgccgttaccggtggggccataggcctgttgttcgaaaacgtgttgatggtgctgctcaagcccgttctgcctgctgcactaccgccagccagcctctggccgtggctgtgggcgcttggcaccatgacggtcatcagcctgctggtggggctacgaccatatcgcttgttgctggcaacgcagcctttacgcgtattacgtaatgatgtggtagcgaacgtctggccgctgaagttttatctgccgattgtcagtgtggtggttgtgctgctgctcgccggattaatgggtggcagcatgctgctttgggcggtgctggcgggcgcggtagtactggctttgctgtgcggtgtgctgggctggatgctgctgaatgtacttcgccgcatgacgctgaaaagcctgcctctgcgcctggcggttagccgcctgttacgtcagccgtggagtacgttaagtcagcttagcgcatttagcctctcctttatgctgctggcactgctgctggtgttgcgtggcgatctgctcgaccgctggcagcagcagctacctccagaaagcccgaactactttttaattaacatcgccacagaacaggtagcaccgctaaaagcgttcctcgcggaacatcagatagtcccggaaagcttttatccggtggtgcgggcgcggctgacggcgattaacgataagccgacagaaggtaatgaagatgaggcgcttaaccgcgaactcaatcttacctggcaaaatacgcggcccgatcataatccgattgtcgccggtaactggccgccaaaagccgatgaagtgagcatggaagaggggctggcgaaacgcttaaacgttgccctcggtgataccgtgacttttatgggcgatacccaggagttccgcgctaaagtgaccagcctgcgcaaagtggactgggaaagtctgcggcctaatttctattttattttccctgaaggggcattagacgggcaaccgcagagctggcttaccagtttccgctgggagaatggcaacggcatgttgacacaactcaaccgccagttcccgaccattagcctgttagatattggcgcgattttaaaacaggtcggtcaggtgctggagcaggtaagtcgggcgctggaagtgatggtggtactggtcaccgcctgcggtatgttgctgttgctggcacaggtgcaggtgggaatgcgtcagcgtcatcaggagctggtggtgtggcgcacactcggtgcggggaaaaaactgctgcgtaccacgttgtggtgtgagttcgccatgcttgggtttgtttccggcctggtggccgcaattggtgcggaaacggcgctggcagtgttgcaggcgaaagtgtttgattttccgtgggagccagactggcgattgtggattgttctgccgtgcagcggagcgctgctgctgagccttttcggcggctggctgggtgcgcgactggttaagggtaaggcgctgttcaggcagtttgcggggtgatgagagtccctcattaccgcgccttaacccattccgccacttccgcccactcaccgcgaaagacaactttttccgcttttttctcaagctgatagcgatacatcgggtcgtaatattcttcaagtaacggcaccagccaggccagatgaccgtcggtgctgccggtggtgagttgcgttgtcagtgctgcatccagccttgcagccagttcgttatagcgctgtagccccagccgacgcttaatcgcgctaagtccgtgatgcaggtattcgcaatactcctgccagccctgttcgtcgccgtacgcgtgggtaaaatcatgatgcatacgcaagaaatactcttcgttcaggcgctcaagacggatctcaaacggatcttctaccaccgcaatcgccgcctgagtcattcgctcgcgcaggcattccggcaggtgattgctaccgatcatccggctttcgtcttccagcacccacaggcgcaaattctgacgggcgtcggtttttagcatttcggcagccagcaggttttcaaaactcgcctggctaagttgtggttgtaacgtgcgaccaaacgcgctaccgcgatgacgcgccaacccttccagatcaacaccgttcggctgttgctgcactaacagcgttttaccgctgccggtacaaccgccaatcagcactatcggtttttgtgccagttcaatagtcgcctgaatcgcggtctggcgcagtgccttataaccgccttccaccagcggataatcaatccccgctgcatgcaaccagctttgcacaatatgactgcgctgaccgccacgggcgcagcagagaataccttgcggattttgcaggcacgctgcccgccaggcgtccatgcgctgctgacgaatttcacccgccaccagtttatgtcccagcgccagcgctgcgtcactgccttgctgtttatagcaggtgccaacggcggcgcgttcatcgttattcattaacggcagattgatagcggcgggcattgcgccgtgctcaaactcgataggggcgcgaacatcaataatgggcgtatcagcaatcagcagggcacgatagtcctgttccgtgtgtctctcttgcatagttaaaagtgaacctcaaatcagcttgcgcgctattttacgcgccaacgcgcaaggaaacttgatttttaactgcgtgggttgccgaaaatttctaaaaatccgctgatttccggcctgcgctgggtaaacaaggtcacaatatcttctaccgctttgccgctgccaaatttgcgccatgccagactcaatgggctaggagggcgcatcgttgggattacccggctgaccagttgttgattatcgatcatactctggcaaaggctttttggcaaaaaaccaatgccaacgcccgccagatgggcggcgattttcgtttccatatcgggaacaataatctctttttgccctggcaatcgccaggcgacgcgtttggttaaggtgcgggcgctgtcttcaatattgaccgccggaaagcgccgcaactgcgcttctgttagcggctcttcaacgttcgccagcggatgatccgccgccatgacaaagcgccattgcacgcttcctaagggatcaagactaaaggtatttgccagcgcctcagttcccgtgacgccgatagccaggctaaaaccttcgtacaataggctgtcccagacgcccatatagatttgtcgggagatgtgaaactgggtaaaggggtaacgctcattcagccacgccagcaactgggcgacggcctgggggttgtagagcaggttgttgatgacaatattcacctggcgttccacgccatcattcacctgttgcagctcgcttggcatactttccagccagctcagccagtctctggcctgggaaagtagatgctcgccagccgctgtcaacgtcacgctgcgagtcgtacggaaaaacagcgctactccggtattctcttccagaagtttaatgcgataactgatcgtcgccgtggttttacataatcgttctgccgctttactaaaacttcctgtttcagcaaccgcaatgaaagtccgcaaggtttctggatcgaacatcttcaggtatccccttttaaatccgcaagttgcgtgattttcttatcctctgatttatcagtatttttacatgataaccctgttcaatttgtggactaaatctagttttggaaaaatattccaacttttgtattgatgttgttctcttaaggttttagattgcctgttattgaaaccaagctgaccggtcggcggtggttgaacggaattatgttacaaggacaaaaagatgaaacttcaggtattaccgttaagtcaggaagcctttagtgcttatggcgacgtaatcgaaacgcagcaacgggattttttccatattaacaatggcctggtggagcgttaccacgatttggcgctggttgagattcttgagcaagactgtacgcttatcagcattaaccgcgcgcaaccggcgaatctgccgctgaccattcacgaactcgaacgtcatccgctgggtactcaggcctttatcccgatgaaaggtgaggtgtttgtggtggtcgtggcgttaggtgacgacaaaccagacctgagtacgctgcgggcgtttatcaccaacggcgaacagggagtgaattaccatcgtaacgtctggcatcacccacttttcgcctggcagcgcgtcaccgattttctgaccatcgatcgcggcggcagtgacaactgtgatgttgaaagtattcctgaacaggaactctgttttgcgtgacgcctgcaaccgacttgcataagataaactaattgttcattgtttatgctcacttgtaggtcggagttaacgtaggtatgacggaagttagacggcgcggcaggccaggacaggcggagcctgtggcacagaagggcgcacaggcgttagagcggggaattgcgattctgcaatatttggaaaaaagtgggggaagtagcagcgttagcgatatttctctcaatctggatttgccgctctccacgacctttcgcttgctgaaggttttacaggcagcggattttgtctatcaggacagtcaattaggctggtggcatataggattaggtgtctttaacgtcggtgcggcgtacatccataaccgcgatgtcctctccgtcgccgggccgtttatgcgccgcctgatgttactttccggcgaaacggtcaatgtcgcgatccgtaacggcaatgaagcggtattaattggtcagttagagtgtaaaagcatggtcaggatgtgtgcgccactgggcagtcgtctgccactgcatgcttccggtgcgggcaaagcgctgctttatccgctggcggaagaggagttgatgagcatcattctgcaaaccggtttgcagcagtttacgccaactacgcttgtggatatgcccaccttgctgaaggacctggaacaagcgcgtgaactgggctataccgtagataaagaagagcatgttgtaggtctgaattgcatagctagtgcaatttacgatgatgtcggtagtgttgttgccgctatctccatctccgggcctagtagtagactgacagaagatcgttttgtcagtcagggtgagctggtcagagacaccgcccgcgatatcagcacggcgttgggactgaaagcacatccataatgtctgtcgcatcccgctctgcggagcgggtttttttgacaaaatttgaaagttggaaaaattttccaataaatagaggtaggaataaaatggcaaaaatgagagccgttgacgcggcaatgtatgtgctggagaaagaaggtatcactaccgccttcggtgttccgggagctgcaatcaatccgttctacagtgcgatgcgtaagcacggcggtattcgtcacattctggcgcgtcatgtggaaggtgctagccacatggcggaaggttatacccgcgcaacggcagggaatatcggcgtatgtctggggacttccggtcctgcgggcacggacatgatcaccgcgctctattccgcttctgctgattccattcctattctgtgcattaccggccaggcaccgcgcgcccgtctgcataaagaagattttcaggccgtagatattgaagcaattgctaaaccggtcagcaaaatggcggttacagttcgtgaagcggcgctggtgcctcgcgtgctgcaacaggcatttcacctgatgcgttctggtcgtccgggtccggtactggtggatttaccgttcgacgttcaggttgcggaaatcgagtttgatcctgacatgtacgaaccgctgccggtctacaaacctgctgccagccgtatgcagatcgaaaaagctgtagaaatgttaatccaggccgaacgtccggtgattgttgccgggggcggggtaattaatgctgacgcagctgcactgttacaacagtttgctgaactgaccagcgttccggtgatcccaacgctaatgggctggggctgtatcccggacgatcatgaactgatggccgggatggtgggtctgcaaaccgcgcatcgttacggtaacgcaacgctgctggcgtctgacatggtgtttggtatcggtaaccgttttgctaaccgtcataccggcagcgtagagaaatacaccgaagggcgcaaaatcgttcatattgatattgagccgacgcaaattggtcgcgtgctgtgtccggatctcggtattgtctctgatgctaaagcggcgctgacactgctggttgaagtggcgcaggagatgcaaaaagcgggtcgtctgccgtgtcgtaaagaatgggtcgccgactgccagcagcgtaaacgcactttgctgcgcaaaacccacttcgacaacgtgccggtgaaaccgcagcgcgtgtatgaagagatgaacaaagcctttggtcgcgatgtttgttatgtcaccaccattggtctgagtcaaatcgctgcggcacaaatgctgcatgtctttaaagaccgccactggatcaactgtggtcaggctggtccgttaggctggacgattccggctgcgctaggggtttgtgccgctgatccgaaacgcaatgtggtggcgatttctggcgactttgacttccagttcctgattgaagagttagctgttggcgcgcagttcaacattccgtacatccatgtgctggtcaacaacgcttatctggggctgattcgtcagagtcaacgcgcttttgacatggactactgcgtgcaactcgctttcgagaatatcaactccagtgaagtgaatggctacggtgttgaccacgtaaaagtagcggaaggtttaggttgtaaagctattcgggtcttcaaaccggaagatattgcgccagcctttgaacaggcgaaagccttaatggcgcaatatcgggtaccggtagtcgtggaagttattctcgagcgtgtgaccaatattagcatgggcagcgaactggataacgtcatggaatttgaagatatcgccgataacgcagcggacgcaccgactgaaacctgcttcatgcactatgaataagggagataaataatgttacgtttctctgctaatttaagcatgttatttggagaatatgattttctcgcccgttttgagaaagctgcgcagtgtggttttcgcggcgttgaatttatgtttccttatgactacgacattgaagaattaaaacatgtgctggcgagtaataaactcgaacatacgctgcacaatttaccggcgggtgactgggcggcgggggagcgcggtattgcctgtattcctggccgtgaagaagagtttcgggatggcgtagcagcagcgattcgttatgcccgtgcgctgggtaataaaaaaattaactgtctggtcggtaaaacgccggctggtttcagcagtgaacagattcacgcaacgcttgtagaaaacctgcgttatgccgcgaatatgctgatgaaagaagatattttattactgattgaacctattaaccattttgatattcctggtttccatctcaccggaactcggcaggcgctgaaattgattgatgatgttggttgctgcaatttgaaaattcagtatgacatttatcatatgcagcggatggaaggtgaattaaccaacaccatgactcagtgggctgataaaattggtcacctgcaaattgccgataatccgcatcgcggcgaaccgggaaccggagaaattaattatgattatctctttaaggtaatcgaaaattctgactacaacggttgggttgggtgtgaatataaaccccaaaccaccacggaagccggtttacgctggatggatccgtaccgttaaaacgtaacgctattcagacaatgcttttttaggccgctaagttggcaggggatcgtgttgtctgaattcaggaaaagcgaaatttaaaagaggttaattatgaaactgggatttattggcttaggcattatgggtacaccgatggccattaatctggcgcgtgccggtcatcaattacatgtcacgaccattggaccggttgctgatgaattactgagtctgggtgccgtcagtgttgaaactgctcgccaggtaacggaagcaagcgacatcatttttattatggtgccggacacacctcaggttgaagaagttctgttcggtgaaaatggttgtaccaaagccagcctgaagggcaaaaccattgttgatatgagctccatttccccgattgaaactaagcgtttcgctcgtcaggtgaatgaactgggcggcgattatctcgatgcgccagtctccggcggtgaaatcggtgcgcgtgaagggacgttgagcattatggttggcggtgatgaagcggtatttgaacgtgttaaaccgctgtttgaactgctcggtaaaaatatcaccctcgtgggcggtaacggcgatggtcaaacctgcaaagtggcaaatcagattatcgtggcgctcaatattgaagcggtttctgaagccctgctatttgctagtaaagccggtgcggacccggtacgtgtgcgccaggcgctgatgggcggctttgcttccagtcgtattctggaagttcatggcgagcgtatgattaaacgcacctttaatccgggcttcaaaatcgctctgcaccagaaagatctcaacctggcactgcaaagtgcgaaagcacttgcgctgaacctgccaaacactgcgacctgccaggagttatttaatacctgtgcggcaaacggtggcagccagttggatcactctgcgttagtgcaggcgctggaattaatggctaaccataaactggcctgatacccgcaataaaaatggccgatatcagaaaatgaatcggccagcaatattaaaaaagaaagcagccaaagatgttgctagtgtattaaaaataatatttttattttatttgttcctcatagctagattaaaacaacgttatagcatacgtgaaattaagagggatttatggaacatcagagaaaactattccagcaacgcggctatagcgaagatctattgccgaaaacgcaaagccagcggacctggaaaacatttaactattttaccttatggatgggtagcgttcataacgttcccaattatgtgatggtcggcggcttttttattctcggcttgtctacctttagtattatgctggcaattatcctcagcgcctttttcattgccgcggtaatggtattaaacggtgctgcgggcagtaaatacggtgtgccttttgccatgatcctgcgtgcttcttacggtgtacgtggtgcactgtttcccggattattaaggggcggaattgccgccatcatgtggtttggtttgcaatgttacgcggggagtctggcctgcttgattctgattggcaaaatctggccgggatttttaactctcggtggtgatttcactctgttaggcctttctctaccgggcttaattactttcttaatcttctggctggtcaacgttggtataggttttggcggtggcaaagttttaaataaattcactgccattcttaacccgtgcatctatatcgttttcggcggtatggcgatttgggcgattagtctggtcgggatcggtccaatctttgactacattccgagcggtattcagaaagcagaaaacggtggcttcctgttcctggtggtgattaacgcggtagttgcggtctgggcggcaccggcggtgagcgcatccgactttacgcaaaacgcccacagctttcgtgagcaggcgctggggcaaacgctgggtttagttgtggcctatattctgtttgcggtcgccggggtatgtattattgccggagccagtattcactacggcgctgatacctggaacgtgctggatattgttcagcgttgggacagcctgttcgccagcttctttgcggtactggttattctgatgacaactatctccactaacgcgaccggtaatattattccagccggttatcagattgccgccattgcaccgacaaaactgacctataaaaacggcgtactgattgccagtattatcagcttgctgatctgcccgtggaaattaatggaaaatcaggacagcatttatcttttcctcgatattatcggcggaatgcttggtccggtaattggtgtcatgatggcgcattattttgtggtgatgcgcggacaaattaatcttgatgaactgtataccgcacctggcgattataaatattacgataacggttttaacctcactgcgtttagtgtaactctggtggccgttattttatctcttggcggtaagtttattcactttatggaaccgttaagccgtgttagttggtttgtcggcgtcatcgtcgcctttgcggcctacgccttattaaagaaacgtacaacagcagaaaaaacaggagagcaaaaaaccataggttaattaatcccgatattgaacattgagttaaaaaccaatctgtattttacaaggagtttgttatgtcttttgatttaatcattaaaaacggcaccgttattttagaaaacgaagctcgcgttgtagatatcgccgttaaaggcggaaaaattgctgctatcggtcaggatctgggcgatgcaaaagaagttatggatgcgtctggtctggtggttagcccgggcatggttgatgcgcacacccatatttctgaaccgggtcgtagccactgggaaggttatgaaaccggtactcgcgcagcggcaaaaggtggtatcaccaccatgatcgaaatgccgctcaaccagctgcctgcaacggttgaccgcgctagtattgaactgaagttcgatgccgctaaaggcaagctgactattgatgcggcacaactcggtggcctggtgtcttacaacatcgaccgtctgcatgagctggatgaagtgggcgttgtcggcttcaaatgcttcgttgcgacctgtggcgatcgcggtatcgacaacgacttccgtgatgtaaacgactggcagttcttcaaaggtgcgcagaagctgggcgaactgggtcagccggtgctggtgcactgcgaaaacgcgctgatttgtgacgaactgggcgaagaagcgaagcgtgaaggtcgcgtaaccgctcatgactatgtggctagccgtccggtatttaccgaagtggaagcaattcgccgcgtactgtatctggcgaaagttgctggttgccgtctgcacgtttgccacgtcagcagcccggaaggtgttgaggaagtgactcgtgcacgtcaggaaggtcaggacgttacttgtgaatcctgcccgcattactttgtactggataccgatcagttcgaagaaatcggtactctggcgaagtgtagtccgccgatccgcgatctggaaaaccagaaaggcatgtgggaaaaactgtttaacggtgaaatcgactgcctggtttccgaccactctccatgcccgccggaaatgaaagccggtaacatcatgaaagcatggggcggtatcgccggtctgcaaagctgcatggacgtgatgttcgatgaagcggtacagaaacgcggtatgtctctgccaatgttcggcaaattaatggcgactaacgcagcagatattttcggtctgcagcaaaaaggccgtatcgccccaggaaaagatgccgacttcgtcttcattcagccgaatagcagctatgttcttaccaatgacgatctggaatatcgccacaaagtcagcccgtatgttggccgtaccattggcgcgcgtatcacgaaaaccatcttacgtggtgatgtgatttacgacattgaacagggcttccctgttgcgccgaaaggtcaatttatccttaaacatcagcagtaatctggcccctgcaatgcccgtccttgcggcgggcattctccggttaaggtgtgtttatgttcaattttgcagtcagccgcgaaagcctgttaagtggatttcagtggtttttctttattttttgcaacacggttgtggttcctcctacgctactttctgcttttcagttgccgcaaagtagcctgcttacgctcacgcaatatgcttttcttgctaccgcactggcctgcttcgctcaggcgttttgcggtcatcgtcgcgctattatggaagggccaggtggcctgtggtggggaaccatccttactatcacccttggtgaagcaagccgcgggacaccgatcaacgatatcgccaccagcctggcagtggggattgcactctccggcgtgctgacgatgttgattggttttagcggattaggccatcgcctggcacggttatttacgccgagcgtgatggtcttgtttatgttgatgctgggcgcgcagctgaccactatctttttcaaaggtatgctcgggctgccgtttggcatagccgacccgaattttaaaattcagttaccgccgttcgcgctcagcgtggcggtgatgtgcctggtactggcgatgattatcttcctgccgcaacgttttgcccgttatggcctgctggtcggcaccataaccggctggttgttgtggtacttttgctttccttctagccacagcctctccggtgagttgcactggcagtggttcccgctcggcagtggcggtgctttgagcccgggaattattctgacggcggtgattacaggtctggtaaatatcagcaatacctacggtgcgattcggggcacggatgttttttatccgcagcagggcgcagggaatacgcgttatcgtcgtagctttgtggcgaccggatttatgacgctgataaccgtaccgctggcggtaattccatttagtccgtttgttagttccattggtttattaacccagactggcgattacacgcggcgtagctttatttatggcagcgttatttgcctgctggtggcgctggttcctgcactcacgcgactgttttgcagtatccctttacccgtgagtagtgcggtcatgctggtttcttatctgcctttactcttttccgcgctggtgtttagccagcaaataacgtttaccgctcgcaatatttatcgactcgcattgccgttatttgtcggcatatttttaatggcattaccgcctgtgtatctgcaagaccttccattaacgcttcgtcctctgctcagtaacggcttattggtcgggattttactggctgttcttatggataaccttattccgtgggaacgcatcgaataatttgttgaaaaaggattgataatgaagattgtcattgcgccagactcttttaaagagagcttaagtgcagaaaaatgttgtcaggcaattaaagccgggtttagcaccctctttcccgatgcgaactatatctgtttgccgatagcggatggcggcgaagggacggtggatgcgatggtcgccgcgacgggcggcaacatcgtgacgcttgaagtctgcgggccgatgggcgaaaaagtgaatgctttttatggccttaccggcgacgggaaaacggcggtgattgagatggcggcagcaagtggcctgatgctggtcgcgcctgaaaagcgtaatccgttgctggcctccagttttggtacgggggagttaattcgtcatgcgctggataacgacattcgccatattattctcggcattggcggcagtgcgacggtcgacggcggtatgggcatggcgcaggcgctcggtgtgcgtttccttgatgccgacggtcaggcgctggcggcaaacggtggtaatttagcgcgcgtggcaagcattgagatggatgaatgcgatccgcgtctggcgaattgccatattgaagtagcatgtgacgttgataacccgctggtaggggcacgcggcgcggcggcggtgtttggcccgcaaaaaggggcaacgccggagatggtcgaagaacttgaacaggggctgcaaaattacgcccgtgttttacaacagcaaactgaaattaatgtctgccagatggcgggcggcggcgctgcgggcggtatgggtattgcggcggcggtatttctcaatgcggatattaaaccgggcattgaaattgtgttgaatgcggtcaatcttgcgcaggcagtgcagggcgcagcactggtgattaccggggaagggcgcatcgacagccaaacggcaggcggtaaagcgccgctgggtgtggcgagcgtggcgaagcagtttaatgtaccggtgattgggattgctggcgtattgggtgatggcgtggaagtggtgcaccagtacggcattgacgcggtattcagcattttgcctcgtctggcacctttagccgaagtgctcgccagcggtgaaaccaatctcttcaacagcgcgcgaaatattgcctgcgccattaaaataggtcagggaattaaaaactaacccttacctttaaagcggatgcgatttatatcgcataagagtgcagtactcatgccggatgcggcatgagtaccatatccttcctgaaaatcgcgcaaattctatatattgcagagatcatgtaggcctgataagcgaagcgcatcaggcaatgttacaaaaaaagccacggtataaaccgtggcaaaatccaacatagctaaaaataatcaggcgagtggtatgacttaaatctctacgtcgcggttacaatctttgctgtaaatatagctgaacgcttcaccacgccctacaccataaccagcctgtaaagaataagcgcccataaagatgtaatcgccttttttcaccgggatccagttattgtcgaggttataaaccccctgaccggaaagaatataggcaccgtgttcctgaacgtgtgtttcgatataaccgtggctggcacctggtgcaaaagagaggatatgcatgttcatatcaaaacctaactctttgggcagaaaatccagcagaataacatcgtccatgccttcataatgaatgcgttccagttcgctggcattgccagaaaccagccacggtgcatagccttctaccggaacatagcggcgcttatataaaaagatttggctgtcttcggcctgggcgttaacaaacgtcattaaggagcctggcgggcaataaagatagccaccttcgcttaaggcaaatgttttgccttcggctttggcagtgatatttccagagatcacatacaggaacgtttcaatgccttcgccaccgaagccctgttggttgccaccgttttgatgcagtgtgaccagataatcaacaaaagaggcacccagctttggcgtggagaggattgtcgcgtcacaattttcaaagcccggaataatattttttaccagaccatccggggttaacagtgcgaaattaccgtgtttaacaatcgcacggttagccagtaaatcttcgcggtaaccggtgacgttatttaaatatcccatttatgactccttatttctgccaggcaagttgataaagcatgagtgccaacgttttgaccccttcggcaaggtcggtaatattggtgcgttccgccgggttatggctgatcccgttgatgctggggataaaaatcatgcaggttggtacgcgaggcgcgaaaatttgcgcgtcgtgcccggcaccactgtgcatcacccggtaattcagtttttctctttcacacaattctgtcagggtggcgaccagctccttattcatcggcacgggttcttcgtccatccataaatcgatatcaataccaatgtccatttcatcgcaaatcgcccgcatgtcgttttctaactgttgggtgaaatcgcgcagcacggcagcgtcggtatgacgacaatcaatggtgaacgtggttttacccggcaccacatttaccgtattcgggcgcggctctactttgccaaaggtcagaaccagcggatcgcccatccttttcgctttttcgacgctctgatggcaaatgcgactgaaagcgtaaactgtatcacgacgataacccatcggcgtggtgcctgcatggttactttcgccgttcagcgttaccgtataacgacgctgcccgacaattgcattcaccacgccaatactttgcccattactttccagcacacagccctgttcaatatgcagttcaacaaaggctttaatatcctgacgcggagttagtggggcgttcggaagagtaaatccgcaagccttcatcgcatcgacaaaactatttcctttggcatcacagatattccgcacgtcgtcaggattcgccagcccaaaaatatttttactgccccagaagacatacgggaagcggctgccttcttcttctgccatcgccaccacttcgaccgtacgtagcggcgcgccgtattgcgttttcagccagtcaattgccagccacgccgccagcgcgccgaattgcccgtcaaggttaccgccgttaaccacggtatcgatatggctaccgctcagaaccacttcctgtggatattcggtgccattcaggcgaccgtataaattccccacttcatcgaaacgtgtttccagcccgcttgctgccattctttttttaaattgctgctgggtttccagccattccgggctataaagtaaacgggtcatcccacccgctgggtcagcgccaaaagaggaaagccagggcagcgtttcttctatagcttgacggaaatgtgtaatcataagaaagtcctgtctcaataattattgcgcaaagggatttttcgtttcgtaactcgtgttataaagcgcgtcggaaattaaatactggtaaatatcatcaacaatttcgatgccttcgacggcggctttgcgttgtttaatatcctgatcctgtccgggataataaacctgattaaaaccgggcgcgggggtaatggcatttaattcgcgcatggtctggctaagatgttgacggaataattcgctggaggagaaaaagttcggattaataactatatgtaattgccccaaattacgccctgcgtgtaaatcgtcatacatgctactaacctgtcgcccgaacggtaagccgagtaagacgccactgaggacgtcaatcatcatcatcaggccatacccttttggcccggcggcggggagcagagcatgtaccgcgaacggatcggttgttggtacaccgtttttatcgaccgcccaggtatccgggatagacatattacggctgcgggcgtcgagcacttttccccatgcctgtacggtagtcgccatatcaaaggtaaggatctcgtcgccttctcccggcgcggcaaaggccagggggttagtaccgtagtaaatttccgcgccgccaaacggcaccaccattggatcggactggcacatgctaatgccaatgaatccggcgcgggctgcctgctgcacaaaataagagattgcgccgctgtgacccatccggctgataccgaccaccgcaacgccattttgctgggcggttttgatggcatgttccatacccattttcgccgcgacctgtccggcggcattgtcggcatgtaaaattgcgctgcacggcccggtttcctcaagacgaaactccggttcgcggttggtgccgcctttactaatgcgttccgcgtagtattccacgcgcaccgcgccatgagagtggatccctctggcatcggcgtaaaccaatacttcagccacggttgcagcgtgctcacgttttaacccagcctggcagagtttattctcaattagctggtggagtgtttcccgactgattttcatctgtcttcctttttaacgacggtgtgaagcatgactgcaattaacatacagggaaaatatctggattatgtgatccagacaggcaaaaaaatatagttagaatttatttgataatccgctcacttttaacctgatttttaaaacaacaacgcttattaaaaaataatgagtaatagcctggtggttatttgaattcttttgttaataattcctgtgtgatattcatcaccttatttactcgttgtcatcgataccgtaatcgccacattaacactgctcgtgcaattgccatgggtgcaatttttaaggagttgttatgatccacgcctttattaaaaaagggtgttttcaggatagcgtcagtttaatgattattagtcgaaaactcagcgaaagtgaaaatgttgatgatgtttccgtaatgatgggtacgcccgccaataaagcgttattagataccacaggtttctggcatgacgattttaataacgccacgccgaacgatatttgcgtggcaattcgtagcgaagcggcggatgcggggatcgcgcaggcgattatgcagcagcttgaagaggcgctaaaacaactggcgcaggggagtggcagcagccaggcgttgacgcaggtgcgtcgctgggacagtgcctgtcagaaattacccgatgccaatctggcgctgattagtgtggctggcgagtatgcggcggagctggcaaaccaggcgctggatcgcaacctcaacgtgatgatgttctccgataacgtcacgctggaagatgaaatccaacttaaaacccgcgcgcgggaaaaaggcttgctggtgatggggccggactgcggtacgagcatgattgccggcacaccgctggcttttgctaacgtgatgccggaaggcaatattggcgtcattggcgcttccggtaccgggattcaggagctgtgtagccagattgcgctggcaggggagggaattactcacgcgattggccttggcgggcgcgacctcagccgtgaagtgggcggcatcagtgcgctaacagcgctggaaatgctcagtgcagacgagaaaagcgaagtgctggcatttgttagtaaaccacctgccgaagctgtgcgtctgaaaattgttaatgccatgaaagcaaccggcaaaccgacggtggcgctgtttttaggttataccccggcggtggcccgcgacgagaatgtctggtttgcctccagcctggatgaggccgcacgcctggcttgcctgcttagtcgcgtcacggcgcgacgtaacgcaatagcgcctgtcagcagcggatttatttgcggtttgtataccggcggtacgctggctgccgaagcggcgggattacttgccggacaccttggcgtggaagccgacgatacccatcaacatggcatgatgctggacgccgatagccaccagattattgacctcggcgatgatttctacaccgtcgggcgtccccatccgatgatcgacccaaccttacgcaaccagttaattgccgatctcggcgctaaaccgcaagtgcgcgtgttgctgcttgatgtcgtgattggcttcggtgcgaccgccgatcctgccgccagcctggtgagcgcctggcaaaaagcctgtgccgcgcgtttagataatcaaccactgtatgccattgccacggtgacaggcactgaacgtgacccgcaatgccgcagccagcaaatcgccacgctggaagatgcggggattgcggtcgtgagtagcctaccggaagccaccttgctggcggcagcgttaattcatccgctcagccctgccgcacagcaacacacaccgagtttactggaaaacgtcgccgtgattaacatcggattacgcagctttgcgctggagctacaaagcgccagcaaaccggttgtgcattaccaatggagcccagtcgccggtggcaataaaaaactggctcgtttattagaacgtttgcaataaggggttcccatgtttacatcagtggcgcaagccaatgctgcggttatcgaacaaattcgtcgcgctcgtccacactggctggatgtgcaaccggcttcttcacttatcagcgaactaaacgagggcaaaacactgcttcacgccgggccgccaatgcgctggcaggagatgaccggacccatgaaaggggcgtgcgtgggcgcatgtctgttcgaaggttgggcgaaagatgaagcgcaggcgctggcaatactggagcagggggaagtgaacttcattccttgtcaccatgtgaatgccgtcgggccaatgggcggtattacttctgccagtatgccgatgctggtggttgagaacgtgaccgacggcaaccgggcgtactgcaacctcaacgaaggtatcggcaaagtgatgcgttttggcgcttacggcgaagatgtcctgactcgccatcgctggatgcgcgatgtgttaatgccagtattaagcgcggcgctggggcgcatggagcgcggtatcgatctcacggcgatgatggcgcagggcattacgatgggcgatgagttccatcaacgcaatattgcttcctctgcactgttaatgcgtgcgctggccccacaaattgctcgcctcgatcatgataaacagcacatcgccgaagtgatggatttcctcagcgtgaccgatcagttcttcctcaacctcgcgatggcttactgcaaggcggcgatggatgctggcgcgatgatccgcgcaggcagcatcgtcacggcaatgacccgcaacggcaatatgttcgggattcgggtaagcgggctgggcgaacgctggtttactgcgcctgtaaacactccgcaaggtctgtttttcaccggcttctcgcaggagcaggcgaacccggatatgggcgatagcgcgattaccgaaacctttggtatcggaggtgcggcaatgatcgcagcgcctggcgtaacgcgctttgtcggtgcgggtggcatggaagcggcaagagcggtatctgaagagatggcggaaatttaccttgaacgcaatatgcagttgcagatcccaagctgggattttcagggcgcgtgcctggggctggacattcgtcgcgtggtagaaaccggcattacgccactcatcaataccggtatcgcccataaagaggcggggatcgggcagattggcgcaggcaccgtgcgggcaccgctggcgtgctttgaacaggcgctggaagcactggctgaaagcatgggtattggttgaggaacgcgcaatgacgatcatccatcctctgcttgccagtagtagcgcaccgaattatcgccagtcctggcggttagcgggagtgtggcggcgggcgattaacctgatgacggaaagcggcgaactgttaacgttgcatcgtcagggtagtggtttcggccccggaggatgggtgcttcgccgtgcgcaattcgatgcgttatgcggtggattatgcggcaatgaacgaccacaggttgtggctcaagggattcgcctcgggcgtttcacggttaaacagccacagcgttattgtttgctgcgtattacgccgcctgcgcatcctcaaccacttgcagctgcatggatgcaacgcgcggaggaaaccgggcttttcgggccactggcgttggcggcaagcgatccgctgcctgctgagttacgccagtttcgtcactgttttcaggccgcgctcaatggcgttaagaccgactggcggcactggctgggtaaaggccccggattaacgccgagtcatgatgacacgctgagcggaatgctgctggcggcctggtattatggcgctttagatgcgcgctccggtcgtccgttttttgcctgttccgacaatctgcaactcgttaccacagcggtgagcgtcagttatttacgttatgccgcgcaaggatatttcgccagcccactcctgcactttgttcatgctctgagttgcccgaaacgtaccgctgttgcgattgatagcctgctggcgctggggcatacgagtggggcagatacgctgctggggttctggcttggccaacaattattacaaggaaaaccatgaaaacactggttgtggctcttgggggcaacgccttactccagcgcggtgaggcgctgacggcagaaaatcaatatcgcaatatcgccagtgctgtacccgcgctggcacgcctggcccgttcttatcggttggcgattgttcacggcaacgggccgcaggtggggctgctggcattgcagaatctggcgtggaaagaggtagaaccgtatccgctggatgtgctggttgcggaaagccaggggatgattggctatatgctggcgcagagtttgagcgcacagccgcagatgccgcccgtgacgacggtgctgacgcgcattgaggttagccctgatgatccggcgtttttgcagccagagaaatttattggtccggtttatcagccagaagaacaagaggcactggaagcggcttacggctggcagatgaaacgtgatggtaaatatttgcgccgggtggtggcgtctccgcaaccgcgtaaaattctcgacagcgaagccatcgagttgttgctcaaagaggggcatgtggtgatttgcagtggcggcggcggtgtgcctgtgacggatgacggagcagggagtgaagcagtgattgataaagatctcgccgctgcgttgctcgccgagcagattaatgcagatggactggtgatcctcaccgatgctgatgcggtatatgaaaactggggaacgccgcagcaacgtgccattcgccatgccacaccggatgagttagcgccatttgccaaagccgatggtagcatggggccgaatgtaacggcggtgagtggttatgtcagaagccgtggtaaacccgcgtggattggggcgttaagccgaattgaagagacgctggcgggcgaagcggggacctgtattagcctgtaatcgtaggcattagacatttgtgcctgatgcgacgcttgacgcgtcttatcaggcctacaaccggtgccgcatccggcaattggtgcacaatgcctgatgcgatgcttgacgcatcttatcaggcctacaatgggtaccggatcggtaggccggataaggcgtttacgccgcatccggcaagaatagagcaccagttaaccgaacttactctgcgcccaaatcacgccgctggcatattccggcggcagcagcgggattaaggcttccagcgtcgcagtcagacggcttgtgtcgctgtcggtcaaattcagatgccccactttacgccccggacggacttctttgtcgtaccagtgcagatgcaccagcggcagtttcagccagtcataattcacatcgctaccaatcagattgatcatcacgctcggattattcaccactggttgcggtaacggcagatcggtaatcgcccgcagatgcagctcaaactggctgatgctggcaccgttttgtgtccagtgaccgctgttatgcacacgcggtgccagttcgttgatcaacagaccttgcggggtgacaaaacactccatcgccatcacgcccacatagcccagctcctgcataatcgcgctcagcatctcttcggcttgcgcctgctgctgtgcgttggcctgcggaaaagcgacgctggtgcgcaaaataccgtcctgatgcaggttatgcgtcagcggataaaacacggtgctgccatcaaagccgcgcgcgccaaccaggctcacttcaccagagaagttaatgccctgctcgacaatacattcgccgtaacactctgccggtaactgttcggtttcatttgcgcgtaaacgccattgaccgcgaccgtcataaccaccagtgcgacgcttaacaatcgccagctcacctaaacgatcaaacaccgcaggccactcgctgcgttcggcaagtaactgccacggtgcagtcggcaggtggagcttatcgaaaagctgcttctgagtcagacggtcagcaataatcgggaacacatcgcggttcacaaaggccggatggcgcgccagctcgcgggttaatgcggtttccggccagcgttctatctcagcggtaatcacgctttgttgaaaaggcaccgccgccggttcagcgtccagcccgactggccagacagcaatgcctaacggttcgcctgcctgacgcagcatacggcctaactgcccgttaccgaggacgcaaacctgtttcatgccgcacctcgcgggtccgggttttccagcacttcgtcggtctgggctttgcgccagtcattcagacgctggtgcagttctttatcatgagtcgcaagaatttgtgctgccagtaacgccgcgtttgccgcgccagctttaccaatcgccagcgtacccaccggaatgccgcgcggcatttgtacgatggagtagaggctatcgacaccgctcagtgcggcgctctgtactggcacgcccagcaccggcaccagcgttttggcggcaatcatgcctggcagatgcgctgcgccgcctgcgcccgcaataatcacctgataaccgttctcttcggcgctttcggcgaagctgaacagtttatcgggggtgcggtgagcagaaaccacttcaacgtggtgcgggacattcaggatttcgaagatttcggcggcgaactgcatggtagcccagtcgcttttggaccccatcacgatggcgacacgcgccggattattgcgggaagacatgcgtcttaaaactcctgtggtgcacaactctcggctttagagggcacagagaatagcacggaaagagagcaaggaaaacggttgcgtggctgtgaaatcagcaaagttgcgggttttttaaaacggaaaatgaatcagctcaacgtcatccgccgtgactttcaccatactaccttccgtatgccaggcacccagtaccacgcgaaaagcaggttgctgattggcgataagttcatgcaccgccgggcgatgggtatgcccgtggatcagccattgcacctgatgtttttccatcgcactgaccaccgcgttttggttaacgtccatgatcgccaggcttttactgctgttggcttctttgctgttcgcgcgcattcgcgcggcaatgcgtttgcgcacaaacaacggcagggcgaggaatagcgtctgcagccagggtttgtggaccttggcgcgaaaagcctgataacccgcgtcatcggtgcacagcgtgtcgccatgcataatcaacacccggcgaccataaagttcgagcaccttttcttccggcaataacgtcatgccactttcacgggcaaagcgtttgccgagcagaaaatcacggttgccatgaatgaaataacagggaacgccggaatcggacaccgctttgatcgccgccgccatcttgcgatggagtgggttgggatcgtcgtcgccaatccatgcttcaaacagatcgccaagaatatacagcgcgtcggccttgcgggcttcccccgctaaaaaacgcagaaaaccggcggtgatcgccggttcttccacgcagagatgaagatctgcaataaagagtgtcgccacgattactcgctaacggtcacgctttcaatgataacgtcttcttttggcacgtcctggtgcataccgctacgaccggttgcaacacctttgattttgtctaccacgtccatgccgtcaaccacttcagcaaacacgcagtagccccaaccttgcaggctttcgccagagaagttcaggaagtcgttatcaaccacgttgatgaagaactgtgcagttgcagagtgcggagcctgagtacgtgccattgccagcgtaccacgggtatttttcaggccgttgttggcttcgtttttgatcggttctttggtggctttttgtttcatgcccggttcaaaaccgccgccctgaatcataaagccgttgataacacggtggaaaatggtgttgttgtaaaaaccttcgcggcagtagtccaggaagtttttaactgtttcaggtgctttatcgtcaaaagttttgatgacaatatcgccgtgattggtgtggaaagtaaccatttttgcatcctgttccgtttgattggtgcttcaacccagttcgggtcatatatagggtggtgttatagcataaccgcacgatcggatcatcacgcaatgtatgctgattcgcgcgggaaatatgggtattatacgcaactcaattacccacacatgtctaaacggaatcttcgatgctaaaaatcttcaatactctgacacgccaaaaagaggaatttaagcctattcacgccggggaagtcggcatgtacgtgtgtggaatcaccgtttacgatctctgtcatatcggtcacgggcgtacctttgttgcttttgacgtggttgcgcgctatctgcgtttcctcggctataaactgaagtatgtgcgcaacattaccgatatcgacgacaaaatcatcaaacgcgccaatgaaaatggcgaaagctttgtggcgatggtggatcgcatgatcgccgaaatgcacaaagattttgatgctttgaacattctgcgcccggatatggagccgcgcgcgacgcaccatatcgcagaaattattgaactcactgaacaactgatcgccaaaggtcacgcttatgtggcggacaacggcgacgtgatgttcgacgtcccgaccgatccaacttatggcgtgctgagccgtcaggatctcgaccagctgcaggcaggcgcgcgcgttgacgtggtcgacgacaaacgcaacccaatggacttcgttctgtggaagatgagcaaagagggcgaaccgagctggccgtctccgtggggcgcgggtcgtcctggctggcacattgaatgtagcgcaatgaactgcaagcagctgggtaaccactttgatatccacggcggcggtagtgacctgatgttcccgcaccacgaaaacgaaatcgcgcagtccacctgtgcccatgatggtcagtatgtgaactactggatgcacagcgggatggtgatggttgaccgcgagaagatgtccaaaagcctgggtaacttctttaccgtgcgcgatgtgctgaaatactacgacgcggaaaccgtgcgttacttcctgatgagcggccactatcgcagccagttgaactacagcgaagagaacctgaagcaggcgcgtgcggcgctggagcgtctctacactgcgctgcgcggcacagataaaaccgttgcgcctgccggtggcgaagcgtttgaagcgcgctttattgaagcgatggacgacgatttcaacaccccggaagcctattccgtactgtttgatatggcgcgtgaagtaaaccgtctgaaagcagaagatatggcagcggcgaatgcaatggcatctcacctgcgtaaactttccgctgtattgggcctgctggagcaagaaccggaagcgttcctgcaaagcggcgcgcaggcagacgacagcgaagtggctgagattgaagcgttaattcaacagcgtctggatgcccgtaaagcgaaagactgggcggcggcggatgcggcgcgtgatcgtcttaacgagatggggatcgtgctggaagatggcccgcaagggaccacctggcgtcgtaagtaattgcgctattgccggatgcgagttttcgcatccggttatcgtctgcgccaccacaacattcccatcagtagcatccccggcaaccacacccacatcaattcagaaataatcacctgatgcccgtacggcgtggtgtaacgagacaatgcaaacggcgcgacttttatcacctgccagggagcgaaaaagcgttcatcactccacggccacagccagccaacgcctttaccgccagtggttacgctatccagcaagctgtggcttagcaagctgacggttaaaaacagccagcagcgaatcagcccagccctgaaccatcggcgtccaataaacacacataacagcgggacaacaaacgcaaacaccaggctatgggtaaacccgcgatgaccaaaaacattgccgtaagcaacgccaaatttaaagctcaatacgtcggcgtcgggcagcatcgccaggatgattccggcaaataacagacgcggagggatgactttgctacccaaccctaaaccaatgcataggggaacggcggcgtgcgtaataacggttggcatgatggtcgcttcggcaaaatgtcgatgctatcagcatggatgaacggggcgtagagggcaaaagtctgaaaagagaaccggcctgttgatacaggccgggaaagggatcaggcaacaacctgtacgctgtgacctgcaaaactcactgtctgaccggcgacgattttgcagcgtttgcgcgtttcaaccgcaccgtcgactttcacctggccttcggcaatcgcgattttcgcctgcgcgccgctttcgctccagccttccagtttcagcaagtcgcacagctcaacgtgcggatgtttacctaaagaaaatgtcgccatgttactcatcctgtggatcatgatattcaacgcacgcctgtagcgtgttttcaatcagcgtggcaaccgtcatcgggccaacgccgccgggaacaggcgtaatgtaactggcgcgtttagccgcgtcttcaaacacgacgtcgcccacaactttgccattttccagacggttgatgccgacatcaatcacaattgcgccttctttgatccagtcaccgggaataaagcctggcttgccaacggcaacgatcaatagatcggcattttctacgtgatgacgcagatttttagtgaagcggtgagtcactgtagtggtgcaacctgccagcagcagttccatgctcatcgggcggccaacgatattgcttgcgccaatcaccacggcgttgaggccgaaggtatcaatgttgtaacgctcaagcagcgtgacgataccgcgcggggtgcagggacgcagacgcggcgcgcgctggcacagacgaccgacgttgtaaggatggaaaccgtccacgtctttgtccggatgaatacgttccagcactttgacgttatcaatacccgccggtaacggcagttgaaccagaatgccatcgatggtgttgtcggcattcagcgtatcgataagctccagcagctccgcttcgctggtggtttccgggaggtcataagagcgggagacgaacccgacttcttcacaagccttgcgtttgcttgcgacataaatttggcttgcagggttactacccaccagcacaacggccagtcctggtgcccgcagtccggctgcaatacgcgcctgaactttttgagcaacttcagagcgcacctgctgcgcaatcgttttaccgtcaataatctttgctgccatcagagagaggattccatctgttacgtagatcgaaggggatgcgcctattttgtcagaagcggggcgcgctgtcaggtttcgtttcagatttatcgcgtgaagcgacctcttgcgaaggtgaggcgcaccgtcgctgagactgaaagcttcatttttcgtccatgatggcgttgtaaatctggaactgatttatttccttgtctaaggattaagataatttaagaaatacctgacaatataaaaagaattttcagcctggtaatttaccgcttcaggtctatatttgtgttgaatatattttgcgcggaagtattcatctaacggggctctctattttttagaatagagtgcatattttcaattaagacattcttagaggataaaaaggaatttactactatcagtgtcttaaataaagtaatcggttatatacggatgtggagtcgataaatgagattgaaggaatatatatgaaattaagatttattagctctgcgctggctgccgcactattcgccgctacgggtagttatgctgccgttgtagatggcggtacaattcactttgaaggcgaactggtgaatgctgcctgtagtgtgaatactgacagcgcagaccaggttgtcacactcggtcaatatcgtaccgatattttcaatgctgttggtaatacctctgcattaattccattcaccattcagttgaacgactgcgatcctgttgttgccgctaatgctgccgttgcattttctggtcaggctgatgcaatcaatgataatttattggccattgcatccagtaccaatacaacaacagcaacgggtgtcggtattgaaatacttgataatacatccgcaattctcaaacctgatgggaatagcttcagtaccaaccagaacttgatccccgggaccaacgttcttcatttttctgcacgttataaaggcaccggtacaagtgcaagtgcagggcaagcaaatgctgacgcgacttttattatgagatatgaataatcaaaaccacgttgttttgaattatatatcacgtcttataacaaagtaatgtaccggttgtctgaagcggtatggtggcaatgtaaatcgaaatcatgttcactttgtatcatgccgctttattaaatgaaaagggaatgatgtgttgtaagaaaccaaagcaatcatttctttatattccttatttttgccgtcaggaatacacaaggcgtattaactatgatgactaaaataaagttattgatgctcattatattttatttaatcattagcgccagcgcccatgctgccggagggatcgcattaggtgccacgcgtattatttatcccgctgatgctaaacagactgcggtatggattagaaatagccataccaatgagcgctttctggtcaatagctggattgaaaacagcagcggtgtaaaagaaaagagtttcatcattacaccgccactgtttgttagtgaacccaaaagcgaaaatactttgcgtattatttacaccggtccaccgctggcagcagatcgtgagtctctgttctggatgaatgttaagacgatccctagcgtagataaaaatgcattgaacggcaggaatgttttgcaactggcgattttaagccgcatgaaattatttctccgtccaattcaattacaagaattacccgcagaagcgccggacacactcaagtttagccgatccggtaactatatcaatgttcataatccaagtcctttttatgtcaccctggttaacttacaagtgggcagccaaaagttggggaatgctatggctgcacccagagttaatagtcaaattcccttacccagtggagtgcagggaaagctgaaatttcagaccgttaatgattatggtagtgtaactccggtcagagaagtgaacttaaactaaccgaatcatctgacaatatcagagctaattatgaaaatacccactactacggatattccgcagaggtatacctggtgtctggccggaatttgttatagttctcttgccattttaccctcctttttaagctatgcggaaagttatttcaacccggcatttttattagagaatggcacatccgttgctgatttaagccgctttgagagaggtaatcatcaacctgcgggcgtgtatcgggtggatctctggcgtaatgatgagttcattggtagccaggatatcgtatttgaaagcacaacagaaaatacaggtgataaaagtggtgggttaatgccctgttttaaccaggtacttcttgaacgaattggccttaatagcagtgcatttcccgagttagcccagcagcaaaacaataaatgcatcaatttactgaaagctgtacctgatgccacaattaactttgattttgcagcgatgcgcctgaacatcactattcctcagatagcgttgttgagtagcgctcacggttacattccgcctgaagagtgggatgaaggtattcctgctttactcctgaattataatttcaccggtaacagaggtaatggtaacgatagctatttttttagtgagctcagcgggattaatattggcccgtggcgtttacgcaacaatggttcctggaactattttcgcggaaatggatatcatagtgaacagtggaataatattggcacctgggtacagcgcgccattattccgctgaaaagtgaactggtaatgggagacggcaatacaggaagtgatattttcgatggcgttggatttcgtggtgtacggctttattcttctgataatatgtatcctgatagccagcaagggtttgccccaacggtacgtgggattgcccgtacggcggcccagctaacgattcggcaaaatggttttattatctatcaaagctatgtttcccccggcgcttttgaaattacagatttgcacccgacatctagtaatggcgatctggacgtcaccatcgacgagcgcgatggcaatcagcagaattacacaattccgtatagtacagtgccaattttacaacgcgaagggcgtttcaaatttgacctgacggcgggcgattttcgtagcggtaatagtcagcaaagtagccctttcttttttcagggtacggcactcggcggtttaccacaggaatttactgcctacggcgggacgcaattatctgccaattacaccgcctttttattagggctggggcgcaatctcgggaactggggcgcagtgagcctggatgtaacgcatgcgcgcagtcagttagccgacgccagtcgtcatgagggggattctattcgcttcctctatgcgaaaagcatgaacaccttcggcaccaattttcagttaatgggttaccgctatagcacacaaggtttttatacccttgatgatgttgcgtatcgtcgaatggaggggtacgaatatgattacgacggtgagcatcgcgatgaaccgataatcgtgaattaccacaatttacgctttagccgtaaagaccgtttgcagttaaatgttagtcaaagtcttaatgactttggcagcctttatatttctggtacccatcaaaaatactggaatactagcgatagtgatacgtggtatcaggtggggtataccagcagctgggttggcatcagttatagcctcagttttagctggaatgaatctgtagggatccccgataacgaacgtattgtcggacttaatgttagtgtgcctttcaatgttttgaccaaacgtcgctacacccgggaaaatgcgctcgaccgcgcttatgcctcctttaacgccaaccgtaacagcaacgggcaaaatagctggctggcaggtgtaggtgggaccttactggaaggccacaacctgagttatcacgtaagccagggtgataccagcaataatgggtacacgggcagcgccacggcaaactggcaggccgcttacggtacgctggggggcgggtataactacgaccgcgatcaacatgacgttaactggcagctgtctggcggtgtggtcgggcatgaaaatggcataacgctgagccagcctttaggggataccaatgttttgattaaagcgcctggcgcaggcggtgtacgcattgaaaatcaaactggcattttaaccgactggcgcggctatgcggtgatgctgtatgccacggtttatcggtataaccgtatcgcgcttgataccaatacgatggggaattccatcgatgttgaaaaaaatattagcagcgttgtgccgacgcaaggcgcgttggttcgtgccaattttgatacccgcataggcgtgcgggcgctcattaccgttacccagggcggaaaaccggtgccgtttggaagtctggtacgggaaaacagtaccggaataaccagtatggtgggtgatgacgggcaagtttatttaagtggtgcgccattgtctggtgaattactggttcagtggggagacggcgcgaacagtcgctgcattgcgcactatgtattgccgaagcaaagcttacagcaagccgtcactgttattagcgcagtttgcacacatcctggcagttaaaggaaattatcaataagataatctgcagattattattggcgatggcatgtttgtgtctggcaaacatatcctgggctactgtttgtgcaaatagtactggcgtagcagaagatgaacactatgatctcagtaatatctttaatagcaccaataaccagccagggcagattgttgttttaccggaaaaatccggctgggtaggtgtcagtgcaatttgtccacccggtacgctggtgaattatacataccgtagttatgtcaccaactttattgttcaggaaactatcgataattataaatatatgcaattacatgattatctattaggtgcgatgagtctggttgatagtgtgatggatattcagttccccccgcaaaattatattcggatgggaacagatcctaacgttagccaaaaccttccattcggggtgatggattctcgtttaatatttcgtttaaaggttattcgtccctttattaacatggtggagatccccagacaggtgatgtttaccgtgtatgtgacaagtacgccttacgatccgttggttacacctgtttataccattagttttggtggccgggttgaagtaccgcaaaactgcgaattaaatgccgggcagattgttgaatttgattttggtgatatcggcgcaagcttatttagtgcggcagggccgggtaatcgacctgctggtgtcatgccgcaaaccaagagcattgcggtcaaatgtacgaatgttgctgcgcaggcttatttaacaatgcgtctggaagccagtgccgtttctggtcaggcgatggtgagcgacaatcaggatttaggttttattgtcgccgatcagaacgatacgccgatcacgcctaacgatctcaatagcgttattcctttccgtctggatgcagctgcggcagccaatgtcacacttcgcgcctggcctatcagtattaccggtcaaaaaccgaccgaagggccgtttagcgcgctggggtatttacgcgtcgattatcaatgaggtacggagaatgagaagagtactctttagctgtttctgcgggctactgtggagttccagtggatgggcagttgaccctttaggaacgattaatatcaatttgcacggtaacgttgttgatttctcctgtaccgtaaacacagcggatattgataagacggtagatttaggcagatggcctacgatacaactactgaacgctggcgataccacggcactcgtcccttttagcctgcggctggagggatgtcctccgggtagtgttgcgattttatttacgggaacgccggcatccgataccaacctgctggctctggatgatcccgcaatggcacaaaccgtcgccatcgaattacgtaatagcgatcgctcccggctcgcactgggggaggcgagcccgactgaggaagtagatgcaaatggcaatgtcacactaaacttttttgccaattatcgagcgttagccagcggtgttcggccaggtgtggcgaaagcggatgcgatatttatgatcaattataattaatattatattaattcgtataatttggcgtagtcgataagctctacaatactatgcaaacctagcttgccataaatattagatttatgcgcactaactgttttattgctaagtaataacttatcggcaatttctttattagataatccgctaaccagataacgtaatatggtcacttcacgattagatagcacagtgaccgtactactattcgtactacatttattgctttttatatagttaagcgtttcgctgggaaaaaacgtgtatccggagaggatcatctgaacggcatgaaaaatatcattctgatcattgcatttactgacaaaaccgttagcaccagcttgtatcgctctgccagcataaaagcattcacttttgctacttaaaaataacactttcactgtgctctggatttgtttgatccttttcaggaaggtaaaaccgtctgttccgggcaagtctatatccataatgattaaatcaacaggacgggttcggagataatcgatggttatgcgataatcatccgttttcaggacaatctgcaattcactgtttttttgcaacagaacttcaatagacattctgatgataggatgagtatccataatgatcacgctcgttggtttcatagttaccagtctcataggagcggacaattttccgttaggtcgggaaattgtactttgatacatgaaaatacgggttttcttgattcagacgcgcagcggtgtgcgtttgtttgccgctatagcgaaataaatcagaaaatcagacgcggtcgttcacttgttcagcaaccagatcaaaagccattgactcagcaagggttgaccgtataattcacgcgattacaccgcattgcggtatcaacgcgcccttagctcagttggatagagcaacgaccttctaagtcgtgggccgcaggttcgaatcctgcagggcgcgccattacaattcaatcagttacgccttctttatatcctccataatttcagagtgggacatatttgggacattatcaccaaaaatgtcgtctattttcctcgcatgctctgtcaaatgattaggcgcaaggtgagcatacctacgaaccatttctatggactcccatccgcccatttcctgaagcactgataatgggacgcctgactgaatcagccagcttgcccaggtgtgtctgaggtcatggaaacggaaatcttcctcatttatgcccgtcttatccgtttccgctttgcccttcaccacatcactttttgtcgctgtttggcgagataattcaacggtgtcaggccgtaaaacgccttaaaaacagagataaagtagctcgtgctgctatagccacataattgcgccacctgagtgatatttttgttatccatcaataacatctgtacggcgtaacgcatacgacactctgtgacaatctggctatagctggtattttcgttttttaatttctttttgagcaggctggggcttaaacataggctactggcgacaattcgcagattccagtaatgctgaatatcgctttgaataatgcggcagacgctgtcgcggacgctgctgcgtaagatatacatcagtagggcaataaaccggctttgctcaagaaagttagacaatacggtaaaaagcaatgcgcgcgtcaactccgcttcgcagggtctgctgggttgctgcttgctgtggttggcggctagccggaacacttccggtgtacggctatgacaagcgataaccggggttgccagccggctccagggctttacacaggttaagttcttatttaaaaacaacagataatcgttgatgatgttacggttgatgtgggtgattaatacgtgatttaacgtactgagttcaatgacgttattgttgcacgcgaaggcggccaggtagtttttcggaagggtaaacgtagcatggttattgacgcttacctctacctctttttcggtcaggatcaccacgcaaggttcactgctgctcaattgcatttcgcactcctcagatatcagaaactccgctcaaaggatctatgcttcctgcatgagtgatcggcccgttcgccgataacgatcttctttctttagcacgctttttagcaattaatcttgatggaattctgatgagagcgaaagaggtaagccaggtcgtacccgacttacctggaggagatttaatactcgagaatgccgtgcgcgacgggcaaatagcgcagagagaaatagagagtgtctttaccgcaagaggaacgtttcgctaacaggctggcaatttctgcgtccggtttcggtttcgctgtaaaggttttgcctttgccggcgacaaaaagttcataaacaacgccgctggcaggggcgggactttggcaatcggcgctggcctgtaaataacgttcacgctgttcagcggtcagtttatccacgccgctgccatcctgtacccagacattaacgccggttgctttaacgtgttccagcagttggcgatagccatcggggctcatgtttccggcgaaaaaactactgatataaaccggttttgcactaacatcgctaatcagccgctgcgcgttgtttaaccatgttagcaaaggctgacgggcggcttcgctgcgccagttcaggtcgtcaatttccgcgctgatgtaccagccatccggcgttatgccaggcgcggcgctccataatctggcttgctggagatcggcagccagcaggcgattaagatagctttccagcgctgcggagctctgtttctggtgcataaaaaattccggatcggcgttcagcccgacaataagcttcagaccagcctgttgcgcagctgcggcccgcttaaacaataacgtgcgctgttctggctgggtaaatgcatcgccgtaacgggtccattgcaaaacaagggtatcgaagccttgcaaacgtaactgactcatcagcccctgccactgggtatcggtaacctgactatctcggttttgtggttgccagataatacctttcatcgcaaaggaaaaagggctgaccaaaagcagtgtcagcaatacgaaaatgaacttacgcatttaccagtgcactccaatggtgagaaacgcgttgttgcgctctccgttacgttgattaatcgccttaaaggtatgttgatactcgacgccgagactgactttgtgcggccaggcgtcgtagtgcgtctcgccggtccagatattccagcggaccccgactccgccaagctgcgcgccctgagtgcctttatcacgatagccgttgtcctgaacgtgagcgtaaggctcaatagtctgtccgttagctaccttctgatgccagctgacgcgataatctgccgtccacgcctgaatatcctggcggatatattgcgccgcatcgaggtacaggttttgggcaaaccagccactaccgttcgggtgccattcgtcgctgtatttgccgccattaaagaaactggcgctggcgcgcagcatggtatcggatgcgccattttggccgttcagcggcaactgctgttcgacggcgatgaaaaagatctgatcgcgcagcggcttccagcgcagaccggtgccggacatcggatttttcaccggcatcatcaccccgttttctccggtatcggcaaagacgcggctataaacactgagcaggtcgccttccagcagcatattgcgtccgatgcggtactcggcttccagttgtccgtagctacgatagcttttccctggcgctgcgccgccgacattattgttagcggtactcattgcgccggaacgcaagccgatggaagaatcgaaactgaacgtccagcggcgaccgacctcctcatgcaaacggcggaaattgaagcgttgttgattttgttctggggtcagtggggttatcagcgcctgattatcaatgtcatcaatcaccagccgggcgtagtgctgcgtcgcaggcatgtcatccagacgctggttcacgtaggccagttgtcggatcagtgccggatcgtccggaagccctttatgcgccggttcgagcatttcccggctctgtgcgatatcaccgctatcccacaaggcgtaaccaagcgctgcctgggtgttgctattattcggttccagttccagcgcggcgcgcaaatcactcaccgcggccgggacattatgacgttggcgataaattgtcgcccgcgcaacgtaagcgttggcagaaggcgcaatattgatactgcgcgtgagatcgttcagtgcgagttccggctgaccaggaatgtaacgttgcgcatgcagccaccagtagagggcattgcttcccagtccacgtttttctgcctgttgtagccagcgatcgcgagccgcaccatttcctgccgcctgggcggtattggcagcagcaagcagatcctcattgctcatgtcgtgaagactgattttctgccaggccgccagtgcggtggcgtagtcctcaacctgatacgcctgataggctaccgcacgatgttgccaggcgctcggttgtcgttgttcggcctgaagccatgcatacaacgccacaccgggtagcgtgtcccgataacactttgccagacggttccaggcggcggcatcgtaggaagggctcatatcgcccagcaagcgaactattgccgggcaattatctgcaatacccggcaactgactttgccactgacgttgctccgccagcggtaagggtttgcttaaaatcgccaccttcgccggcgttgccaggtaaggatgactttccagcagagacgccagtcgcgccattaaagtctggctgacacgcgcatcgccctggaaaggatagcgttgcagcaataaatcggcagcttcgcgactctgctcgttctgcatcagttgccaggttagttgatccaggcgggtaagatttgccggttcttgctgatacagcaatcgtgccagacgcagagcttcagccttgttacgggtcgccacgctgacagcataacgctcctcaagcatttcattggcggggagggtggcgagcagtttttgcgctgcgtcgtactgaccttcttttaacagcaccggtagcgtcgcgccaacaacatactggcggttgtcggcaaactgtaccgtataattcgccaacgcctgaacggggttagcgctgtatttagataacagatagagccaacttttctcttgtgcgtccgtggtaaatagtggcttattttcaatgagataatgctggaggcgtgctttttcgccacgataagccagcgcggtcgcgtaagtaatataactctgaggatcggtgaagatcccctgactttgcagtgccaggatccgatcgtccagctgcccggcaagaagcacgtcaaaccactgacggcgttctgccgcgcttaatgtgttctgctggcgtgcttcattgtatagcgtatctgcctgggaccattgtttcaggtagattgcccgttgcagcagatcggttcgcagcgtttttccttccgggcttgcagcaaacgtcgcatcgttcagttgcgctctggcgacaggtaactgtgccagccgcagggcattctgcccgacttcactgcgacaacgcagggtcggcgcagcatcgcacgctttttgctgggcaagcagttcttcaactgtcgtaacgcttttcacttcaaccggaatagccgccagactgcgctcaagtcgggcatctcctgggtgacgtttcagttgatcctcaagcaacagccgcgcccggtcatcatgaccaaaatggcgataggcttccgcaaggtataaagtcagcggaatattatccggcacctgctggtgtatatattcaaattcgcggatggcggttgcttcgtcgttatttttctgtgccttcagcgctttatcgagacggggataaataacaaaatggcgataatcgctcagccccagctcttctgcgctggtgccgatattgtctgcgagtgcgctggtactcaataaagacgtcagcagtaaaccagaccatccgatgacgcgattaaggttattctccttcattttcggactccagttgcgcaacctgttctgtgtttaaacctgctttgagtaatagactttgcatgctaacttgtaattcgcgttgaattgtcaggacgcgatccaacgtttcctggctgataacgccttcggtgaccaaaaacttgccgagcggcagagaactgcgttcatggcgcaataacaacacgttaattgcactacgattaatatgaccgagcgtggtcagtatttcggcgaacaggaactgatgcggcacatattgccgccagatttcaccggcctgctgttccgtgagccactgatgctgaaccgcattgtacaacattgcccgcggatcgtgaccgcgtcggcgtgcataccagtgacgtaaccctgtgacaatttgtccccgcagaacaatgacgtaacgcactttgcgtccgactttacgcgtcagggccgccaggctaaccgggtcaataccatcttcactgccgacaattaactcgtcattttccagacgcagcggcagtaccgcataatgcagcgccacggaggccggcatttcggcaatcaggctggaagggatctgccaggcatcgatggattcccacgccacgccgttttgctctgccagcgcctgtgccagctgctcggcgctaatcagcccctgcatcagcatactaccgcccaggcgtagaccttcgacgcgattacgcagtgctgtatcgagttgttcttcagtgatgacctgattttccagcagaatttgacctaacgggcgcaagctgcgggtatcgccagtcacgctggggaagtcatgcgttgttttatcccacgccacgcgacgtggatcgccgtgttgaagtacctgttttagcgcgcgccagttggccatgaagttaatcaggttgccccagaaaagacgcaggacggaaagcagcccctgcgtcaggccgtagtagccagtaacgaaaatcacccgctgcacgatgcggttaaccatcaaaccaaagtttagccacagcagggtcattaaccatgcgctgccgctgaaaatagaaaggaaatgccaggcatcgggccacaaactttcatacgccagcaacagcaaaagctggatcatcaccagcatcgcgaggaagctgacaaagttactgattgcccctttgcggtcgcgccagagaaagtagttcagcgtcaggctggaggtccatttatgggttttaaagccttggaaaacaatgccgatgatccagcgggatttttgtcgaaccgcagtgctaaaggtatcggggaaatattcgcgcacgcagatcatgttacttgtccgcgcgtgctgtaaaaatttacgctgctcgcgttctttggcttcgtccaccaccggaaaacggacaaaaatttccgtcatacctttttctttcaggcggaagccaatgtcgtaatcttcagtaagactctgcacgtcgaaagcaataccgtcaccgtcagctaacagtgcggtcacggcgcggcggctgaaacaggtgccgacgcctgcgctgggcacttgtccggcgagggcttcacgcaccggaacatctttgccatgcagctcactaaactcatcaatgtaagtcatgctggtgaagtgcgtccattcgcgttcgaacggatacaccgggatctgaatcagatctttacgctcgaccagatagttgaacagacgcaattccatcggactaatcacatcttcggcgtcatgcagaataaaaccagcaaaagcgaaattggcgctacgctcaaattgggtgatggcgtccagcacgttgttcagacagtcggctttgctggtggggccaggacgcgcgcagactaccttatgcacattcgggaagcgagcgcacacttcgtcaacatcacgctgagtatcggggtcgttggggtaggtgccaacaaagatatgatagttttcgtagtcgagcgtggtcgccgccagctcggccatattgccgatgacgcccgtttcattccacgccggaaccataatcgctaacggtttttcatctggtttatacagttcgcggtaactcattcgcgggtagcggcgataaacactcaacttgcgtttaatgcggcgtacccagtagacgacatcaataaaaaaatcgtccagcccgctgatgaacatgatgaccgctaacgttatcgcgattacttttaagccgtagagccaggtagcaaaaacatcaagaagccagtccacacaaaaaccttacattaacgctggttatgtttagggtggcgtatattaaggttttttatgaattgtgacagctttttaccattaataggtatgactattgcggcacgttatttttacactggttataaaagttgccgtttgctgaaggattaagcgggtaatgtgataacaaaccttgtcccccgcgcatcgctcgttaccgcaaccgtgcctttatgcgcgacaacaatgcttttcactatcgccaggccaataccgctaccttcaccttttcgctggcgggaggggtcaacgcgatagaaacggtcaaacaatcgcggtaagtgctcgggcgcaatgggcgtaccggggttttcgacgataacttgcaccaggtgatcgaccgtctgacagcgcactacaattgtctctccggttggcgtataacgcagggcgttgctaagcaggttgcttagcgcccgacgcagcatcagcggatcgcccgcgacctgacacttgtcgccaacaaaccgcaactccacgccgcgatcttccgctaacgcctcgaaaaaatcgaacactttgccgacttcatccgccaggttgagcattttcttttcggggattagctggttgttatcggcctgagcgagaaacagcatatcgctgaccattttcgccattcgcgtcagctcttcgagattagagtagagcacatcttccagctccttctggctgcggctctggctgagggcgatttcggtttgcgttatgagattcgtaattggtgtgcgaatttcgtgagcgatatccgcactgaaattggactggcgggtaaagacatcctcaatacgctcgatcatatggttgaagctcagtaccagctgttccagctcaatgggcacggtctgcgggtcgaggcgaacgtcgagatctttgctggtaatattctggatttgacggctgacgctgcggatcggcgcgtgacctttatgtaccgccaacagtacgataaagacgatcaggatgctgattacgcttgcggtcataataagtttattcatcaaatcatttatgtaatgaagatgaaaatcgatgctaagcgcgatgtagagcgtataaatcggtttgccgtccaccaacgggccaaccggcaagttaatcatccgccagttgctgtgttccatatgcccgtgaccgtggcctggcatcatcatcgtcgggccggaaaggagatacacctcgccaccctgagcgtctttatcgggtatggcgtcacgcgtaaactcgcggatatccggcgcaccgggggagtgatacaccgttttaccctgactatctgccagggaaatcaacacattggaataaccactgacgatatcttccagcgtcattaagcgtcgggcttgcgtttcgtcagggtgatttagtacccgttcaagggtggcgctaatctcttttaaatcattaatatcctgctcggcaaaatgaacttttacactgtggatcatgatccatgcaaaggcgaaaaacgccgcgatggtggccaggctgataaaaaaggtcaggcgggttgccaggctaaacgggcgctgaaatggcttactgaccatccggcacctcaagcatgtaacccacgccgcgcacggtctgaattagcttcggctcaaagtcgttgtcgattttgccgcgcagccgcttcaccgccacatcaatagcattggtatcgctgtcaaaattcatgtcccatacctggctggcgataaggctgcggggcagcacttcgccctgatggcgaaggaagaactccagcagagtaaactctttactggtcaaagtgatgcgcgtgccgctgcgggtgactttgcggctgacgagatcgaccatcaaatcggcaacctgaaactgactttcgataatcaccgccgccccgcgccgcagtaatgtgcgcacccgcgccagcagttcagcaaaagcgaatggcttcaccaggtagtcatctgcccccaactccagccccttgacgcgatgttcaatggtgccaagcgcggtaagcaacagaatcggcatccctttattggcggagcgtaacatgcgcacgatatcccagccgttcacgtccggcagcataatatcgaggattatcagatcataatcaccggtcatcgccagatggtagccattcagcccgttgtcggccaaatcgaccacaaaaccggcttcggttaaccctttggtcaagtattctccggttttcttttcatcttcgacaatcaacagtttcatatttcctccgcatgttgcccgggcaattctagagtagcgggatcagatggcaatcgcttattggcaaaatgacaattttgtcatttttctgtcaccggaaaatcagagcctggcgagtaaagttggcggcataaaatcaccagaaattatgagcctatgtctccttgtaaacttctgccattttgtgtggcccttgcgctaaccggttgtagtctggcaccggattatcagcgtccggcaatgcccgtgccgcagcagttcagtctcagccagaacggcctggttaacgcagcagataactatcagaacgcgggctggcgcaccttttttgttgataatcaggtgaagacgctgattagcgaggcgctggtgaataatcgggatttgcgcatggcgacgctgaaagtgcaggaggcacgggcgcaatatcgtctgaccgatgccgaccgctacccacagctcaatggcgagggcagcggcagctggagcggtaatcttaaagggaataccgccacgacacgggagtttagcaccggccttaacgccagctttgacctcgattttttcggtcgcttaaagaacatgagcgaagccgagcgacaaaattatttagccactgaggaagctcagcgcgcggtgcatattctgctggtttctaatgtcgcgcaaagctatttcaatcagcaactggcgtatgcgcaattgcaaatagccgaagaaacgctgcgtaattatcagcagagttatgcgtttgtcgaaaaacaactgttgacaggtagcagtaatgttctggcgctggaacaggctcgcggggtgatagaaagtacccgcagcgacatcgctaaacgtcagggggaactggcgcaggcgaataatgcattgcaactgttgctgggaagctacggcaagctgccgcaagcgcagacagtaaacagcgacagcctgcaaagcgttaaattaccggcgggattgagcagccaaatcttattgcagcgcccggatattatggaagctgaacacgcgttaatggcggctaatgccaatattggcgctgcacgcgcggcattttttccgtctataagcctgaccagcggaataagcaccgccagtagcgatctaagcagtttatttaacgccagcagcgggatgtggaattttatacccaaaattgagatccccatttttaatgccggacgcaaccaggccaatctggatatcgccgaaattcgccagcagcagagcgtggtgaattatgaacagaaaatccagaacgcctttaaagaagtggcagatgcgctggcattacgtcaaagcctgaacgatcaaattagcgcccagcagcgttatctggcaagcctgcaaattactttgcaacgggcgcgggcattatatcagcacggcgcagtaagttatctggaagtgctggatgccgagcgttctttatttgcaacccgacaaactttacttgatctgaattatgcccgtcaggttaacgaaatttctttgtataccgcacttggtggcggttgacagcaatatactcgtcatacttcaagttgcatgtgctgcgtctgcgttcgctcaccccagtcacttacttatgtaagctcctggggattcactcgcttgtcgccttcctgcaactcgaattatttagagtatgacttttaactccaggagagaataaatgaaaaaagcactgcaagtcgcaatgttcagtctgtttaccgttattggctttaatgcccaggctaacgaacatcatcatgaaaccatgagcgaagcacaaccacaggttattagcgccactggcgtggtaaagggtatcgatctggaaagcaaaaaaatcaccatccatcacgatccgattgctgccgtgaactggccggagatgaccatgcgctttaccatcaccccgcagacgaaaatgagtgaaattaaaaccggcgacaaagtggcgtttaattttgtccagcagggcaacctttctttattacaggatattaaagtcagccagtaacccaggtttaatgagatgaaaaaaatcgcgcttattatcggcagcatgatcgcgggcggtattatttctgcggcaggttttacctgggttgcaaaggcggaaccgcctgcagaaaaaacgagcaccgcagaacgtaaaatcttattctggtacgacccaatgtatcccaatacgcggttcgataaaccaggtaaaagcccgtttatggatatggatctggtgccgaaatatgccgatgaagagagttctgcgtctggtgtgcgcattgacccgactcagacgcagaatctgggggtgaaaacggctaccgtcacgcgcggaccgctgacttttgcccagagtttcccggcgaatgtcagttacaacgagtatcagtatgccattgtgcaggctcgcgctgccgggtttatcgacaaggtgtatccgcttaccgtgggcgataaagtacaaaagggcacaccgcttctcgacctgaccattcctgactgggtggaagcgcagagtgagtatttactgctgcgcgaaaccggcggtacggcgacccagactgaaggcattcttgagcggctgcgactggcgggaatgccggaggcggatattcgccgcctgatcgccacgcaaaaaatccagactcgctttacgctcaaagcgcccattgatggcgtgatcaccgcgtttgatctgcgcgcgggaatgaatatcgccaaagataacgtggtagcgaaaattcagggtatggacccggtgtgggtcactgctgcgatcccggagtctatcgcctggctggtgaaagatgccagccagtttaccctcaccgttccggcgcgaccggataaaacactcaccatccgcaaatggacgctgctacctggcgtggatgccgcgacccgcacgctgcagctgcgtctggaagtcgacaacgccgacgaggcgctaaaaccgggcatgaacgcctggttgcaactcaacaccgccagcgaaccgatgctgctcattccgagtcaagcgctgattgataccggcagcgaacagcgggtgattaccgttgatgccgacgggcgctttgtaccgaaacgcgttgctgttttccaggcaagccaaggcgtcaccgcattacgctctggtctggcggaaggtgaaaaggtggtttccagcggcctgttcctgattgattccgaagccaatatttctggcgcactggagcggatgcgctctgaaagtgcgacccatgcgcattgagggaataaccaatgattgaatggattattcgtcgcagcgtggcgaaccgttttttggtgctgatgggcgcgttgtttctgagcatctggggcacctggaccatcattaatacgccagtggatgcgctgccggatctctccgatgtgcaggttattattaaaaccagctatcccggtcaggcaccacaaatcgttgaaaatcaggtgacttatccgctaaccaccaccatgttgagcgtgcctggcgcgaagactgtgcgcggtttcagtcagtttggcgactcttatgtgtatgtcattttcgaagatggcaccgatccgtactgggcgcgtagccgggtgctggagtacctcaaccaggtacagggtaagctgcctgcgggagtcagcgccgagctggggccagatgccacgggtgttggctggatctatgaatatgcactggtggatcgcagcggtaagcacgatctggccgatttacgcagtttacaggactggtttctcaaatatgagctgaaaaccatccctgacgttgcggaagtggcgagcgtgggcggtgtggtgaaagagtatcaggtggttatcgatccccagcgcctggcgcagtatggcatcagtctcgccgaagtaaaaagcgcgctggatgctagtaaccaggaagcgggcggtagcagcatcgaactggcggaagcggaatatatggtgcgcgccagcggctatctgcaaacgctcgacgactttaatcacatcgttttaaaagccagtgaaaatggcgtgcccgtttatctgcgcgatgttgcgaaggtccagattggcccggagatgcgccggggcattgccgaactaaacggcgaaggcgaagtggcgggcggggtggtgatcctgcgatccggcaaaaacgcccgagaagtgatcgccgccgtgaaggacaaactggaaacgctgaaaagtagtctgccggaaggcgtggagatagttacaacatacgatcgcagccagctcattgaccgcgccatcgacaacctcagcggcaagttgctggaagagtttattgtggtggcggtagtctgtgcgctgtttctctggcatgtgcgcagcgcgctggtggcgattattagcttgccgctggggttgtgtattgcttttattgtcatgcacttccagggactgaatgccaatattatgagcttgggtggcattgcgattgccgtcggggcgatggtcgatgctgctatcgtcatgatcgagaatgcgcataaacggctggaagagtggcagcaccagcatcctgacgccacgctggataataaaacgcgctggcaggtgatcaccgatgcgtctgttgaagtggggccggcgctatttatcagtctgctgattatcacgttgagctttatcccgatcttcaccctggaagggcaggaagggcgtctgtttggcccgttggcgttcaccaaaacgtatgcgatggcgggtgcggcgctgctggcgatcgtagtgatcccgatcctgatgggctactggatccgtggcaaaattccgccggaaagcagtaacccgctcaatcgctttttgattcgtgtttatcatccgctgttgctgaaagtactgcactggccgaaaaccacgctgctggtggcggcgcttagcgtgctgacggttctctggccgctcaataaagttggcggggaatttttaccgcagatcaatgaaggcgacttgttgtatatgccaagcacgctgccggggatttccgcagcagaggcggcgagtatgctgcaaaaaaccgacaagctaattatgagcgtacctgaagtggcgcgggtatttggcaaaaccgggaaagcggaaaccgccaccgattctgctccgctggagatggtagaaacgaccatccagcttaagccgcaggagcagtggcggccaggcatgacgatggacaaaatcattgaggaactggataacaccgtgcggctgccggggctggcgaatctgtgggtgccgccaattcgtaaccgtatcgatatgctcagtaccggcattaaaagccccatcggcattaaagtttccggcactgtgctggcggatatcgacgcgatggctgagcaaattgaagaagtagcgcgaacggtgccaggcgtagcttctgcgcttgccgagcggctggaaggtgggcgctatatcaacgttgagattaaccgtgaaaaagccgcacgttacggtatgacggtggcggatgtgcagttgtttgtgacttctgcggtgggcggggcgatggttggcgaaacggtggaagggattgcccgttatccaattaatctgcgttatccgcaaagctggcgcgatagtccgcaggcactgcgccagctgccgatcctgacgccgatgaagcagcaaatcaccctggcagacgtggccgacattaaagtctctaccggaccgagcatgctgaaaaccgagaatgcgcgcccgacgagctggatttatatcgatgcccgcgatcgtgacatggtgagcgtggttcacgatttgcaaaaagcgatagctgaaaaagtgcagttaaaaccgggcaccagcgtggcattctccgggcagttcgagctactggagcgcgccaaccataagcttaaactcatggtgccgatgacgttgatgattatcttcgtgctgttgtatctggcgttccgtcgggtgggcgaagcgttgctgattatcagcagcgtaccgtttgcgctggtgggcggcatctggttgctgtggtggatgggctttcatctttccgtggcgacgggcactggctttatcgccctcgccggggtcgccgccgaatttggcgtggtgatgctgatgtatttacgtcacgccatagaggccgtgccgagcttgaataatccacaaacattcagcgagcagaagctggatgaggcgttatatcacggcgcggtcctgcgcgtgcgcccgaaagcgatgacggtggcggtgattatcgccggtctgctgccgattctgtggggaacgggggctggtagtgaggtgatgagccggattgccgcgccgatgattggcggcatgatcaccgcacctttgctgagcctgtttattatcccggcggcgtataagctgatgtggctgcaccgacatcgggtacggaaataaaagcaggataccccgtttaaccgtgtggattgtgtcttgcgacgatgggcactaaatgttaaaaggtgcccctcaacaaaaaagacacacaggggaaaggcgtgaaaaacgcgagtaccgtaagcgaagatactgcgagcaatcaagagccgacgcttcatcgcggattacataaccgtcatattcaactgattgcgttgggtggcgcaattggtactggtctgtttcttggcattggcccggcgattcagatggcgggtccggctgtattgctgggctacggcgtcgccgggatcatcgctttcctgattatgcgccagcttggcgaaatggtggttgaggagccggtatccggtagttttgcccactttgcctataaatactggggaccgtttgcgggcttcctctctggctggaactactgggtaatgttcgtgctggtgggaatggcagagctgaccgctgcgggcatctatatgcagtactggttcccggatgttccaacgtggatttgggctgccgccttctttattatcatcaacgccgttaacctggtgaacgtgcgcttatatggcgaaaccgagttctggtttgcgttgattaaagtgctggcaatcatcggtatgatcggctttggcctgtggctgctgttttctggtcacggcggcgagaaagccagtatcgacaacctctggcgctacggtggtttcttcgccaccggctggaatgggctgattttgagcctggcggtaattatgttctccttcggcggtctggagctgattgggattactgccgctgaagcgcgcgatccggaaaaaagcattccaaaagcggtaaatcaggtggtgtatcgcatcctgctgttttacatcggtagtctggtggttttactggcgctctatccgtgggtggaagtgaaatccaacagtagcccgtttgtgatgattttccataatctcgacagcaacgtggtagcttctgcgctgaacttcgtcattctggtagcaagcctgagtgtgtataacagcggggtttactctaacagccgcatgctgtttggcctttctgtgcagggtaatgcgccgaagtttttgactcgcgtcagccgtcgcggtgtgccgattaacagcctgatgctttccggagcgatcactagcctggtggtgttaatcaactatctgctgccgcaaaaagcgtttggtctgctgatggcgctggtggtagcaacgctgctgttgaactggattatgatctgtctggcgcatctgcgttttcgtgcagcgatgcgacgtcaggggcgtgaaacacagtttaaggcgctgctctatccgttcggcaactatctctgcattgccttcctcggcatgattttgctgctgatgtgcacgatggatgatatgcgcttgagtgcgatcctgctgccggtgtggattgtattcctgtttatggcatttaaaacgctgcgtcggaaataaggcattcacgctacatccgacaaaacgatgtcaaccatccgaaaccgctctcatccattcgatgagagcggtttttttaattactgcttaaatgcacccgccagagagcgaatatcattgccggttggcgagtaatccccgcatatccggttgtcaggtcaggatggtaaggcacctgctttacactttcgcccgtggtcagtgatggctgcgggcgaatcgtaccagatgttgtcaattaatcgtgttggcacagcgttatgactatcttttcttttatctgccagtgcacagcaaacatctcattctcacgatgaatgatgacctgctgtttattccagctaattatctgatagtccagaaaacctgcatcagtttggatctcacttgccttaaatgcgctctctttggcggaaaatgccagtgtcagcgccagagaaaaggctaaaccgcagtctgcgagtcgctcgtgttccgctggtgtaataatgttgtctgtcaattctcttgcggtttgtacagaaaaaatttcttctatatcaatgccaatcggttgacgagataccacggctaatgccgtagtcccacagtggctaatactgccgtatacctccgcaggccagacaggttggcgtagctcgccgattgcgggcacacatttatagccatattcccgcaaagcataaacagcagcgatccgtccggctaaatgctctgttttacgtttacgtccagcgtgttgcagttgtgcgtagtgcggcagccagagtaaatcctgctcacaaaaattcgccggatcgaactcaacaaaatgcagcgtatgtccggcaaaggggagggaggtatgcgtagttttcatatcgaccatattcgagactgatgacaaacgcaaaactgcctgatgcgctacgcttatcaggcctacatggtcctgcaatatattgaattggcaagatttttgtaggccggataaggcgttcacgccgcatccggcatgaacgacgcgcactttgtcaacaatctgacgttagcatcagaagtgggtgtttacgctcatataccacgtacgtcccggctcgttataggtatacgccccggcaccggcgatatagttggcccctgccgaatcgcccgtggtctgggcattacccgcacgccacaaacgtttgtcgaacagattgtccacgccgccggtcagactgacattcttcgtcacatcccaggtcgcgctcaggccaacaatgctgtaaggactaatttctttggtttccggtccaaccgctggctgacctttatagttgtacttcttcggctgctgcttgccgtaccaggtgaaggtcgtttgcatgctcaaatcttcccgtgcctgccagctcagcgtactgttcaacgtatactccgggatgatgctcaaacggtcgcccgtggttttgttttcactcttcagcatataagtgatgttattggtccacatcaccgtttcgctaaccggtacgtttaagcttccttccagaccttcaaccaccgctttcggcacgttatcccactgatagagatcggtgccgactgcgttttgccctacagccacatagcccgcttcaatcttattgcgataatcgttacggaaccaggtgacgcccgccagccacccgtcgcgtttgaactccagaccaatctctttgttgatgctggtttctgctttcaggtcatcgttaccttgcagatagcagccgcccgcgctggcatagcaaccctgacctttactgtagagaatgtagttcgggttagtctggtacaggctcggcgctttataagcacgggcgatgcccattttcagcgtgaagtcatcgcctaaaccttggcttatgttcagcgccgggctccagttattgccgacaatactgtgatgatcgaaacgcagccccggcgttacgatggtgctgtcagtcagctccatgttgttttcggcaaacaggctgaaaatttctgctttactatacgggctacggtcggtggtactcacgccatcaatagcgccaccggtattcgttccggtcagtgcctgggtgttggaacttaagtccttcatccgttgctgattccactccgtacccagcgtcagcgtctggttaacgaggaaatcaatcggcaggttaacttcgctgtgcagcatcacgtcatcaagatcgatatcgacgaaatcctgtgtcgctttttcgttaaatttcccttcggtaccgcccgccagaccttccggaatacggctgttacgggtgtgttcgtactgcacccagttgctggtggtcacgccgttatcccagccaccgttccaggtcagcgcgtagttctggcgatacagacggttggtttcatcgccatatttgctgcgggtataggaatcggagttggtattctgggtgtcgcccgcatacaggttaccctggcggctgtaacctgcttccagttccaggctttgcaatggcgcgaaatcccagcgcaccacgccattaatatctttgttgattaccccttcgcgcccggctggtaacgtcgtggcatacgttccggcacgcgcggactgatggccctggttgatatcccacgcgtcagcctgggttttgtcgaggttgccatacaaacggaagctgaattcgtcgcccagcggaccggtcaggctaaagttagtgcgtttggtggcaccttcctctttatgttctggcgcattgaaatatgcgtcccaggagccgtgccactcgccgctgccttttttggtaatgatgttaaccacgccgcccgccgcgccgttgccataacgcgcagctgccggaccacgcagaacttcaatacgttcaatcatttcaggtggcacccaggaagtatcaccacgggtatcgcgctcgccacgccagccctgacgcacgctgttacggctgcttaccggcttgccgtcaatcaaaatcagcgtgttttccggacccataccgcgaatatcaatctgtcggttattcccacgctgaccactggtggagttaccggtcaggttaacgcctggcatggtacggatgatcttgctcacatcgcgggcaaccgggtttttgcggatttcatctgcggtgatggtgctaacgccaggcgcctgtaagttctgctcggcggcggtaacgacaatagtatcgtcatgactaacaggagtatcggtcggctcttgtgcctgcgctaccccataaatccccagattgaccaacaaggccagggaatgaatcttcttgttcattgttttattcctgcatttttgccacgaattgcaactgtcgggcatggtcgtcatcaacacgacgcatcccgctaccgcgaaaacctttgatcctgaaagacacgcagtgcagttggttaattaatgtccgcgcttcccacggcgcgccattacgctattgcaaatgcaaatagttatcaataatattatcaatatatttctgcaatcaatgaaaaattgcacagtaaacatggggttatggtgtgacggcgttaaaagtaggaagtgagagctggtggcagtcgaaacatggcccggaatggcagcgtctgaatgacgaaatgtttgaggtcactttctggtggcgtgatccccaaggttctgaagaatacagcacgataaagcgcgtatgggtctacatcactggtgtgaccgatcaccatcagaacagccagccccagagcatgcagcgaattgcaggcactaacgtctggcagtggacgacacaactcaatgccaactggcgcggcagctactgctttattcccaccgaacgcgatgacattttttctgtaccatcccccgatcgcctcgaattgcgcgaaggctggcgaaaactattaccccaggcgatagccgatccgctgaacctacaaagctggaaaggcgggcgagggcacgctgtttctgcactcgaaatgccgcaagcgcctctgcaaccgggatgggattgtccgcaagcgccagaaatacctgccaaagaaattatctggaaaagtgaacggttgaaaaagagtcggcgtgtatggatttttaccaccggcgatgcaacagcagaagaacgcccgctggcagttttgctcgatggcgaattttgggcgcaaagtatgcccgtctggccagtgctgactagcctgacccatcgtcagcaacttcctcccgccgtgtatgtgttgatcgacgctatcgacaccacgcaccgcgcccacgaactgccgtgtaatgcggatttctggctcgcagtacagcaagagttattacccctggtgaaagctattgccccttttagcgatcgtgccgatcgcaccgtggttgccgggcagagttttggtgggctttccgcgctgtatgccggactgcactggcctgaacgctttggctgtgtattaagccagagtggaagctactggtggccgcatcggggcgggcagcaagagggcgtgttacttgaaaagctaaaagctggtgaagttagcgccgaaggtctgcgcattgtgctggaagcgggtattcgcgagccgatgatcatgcgggccaatcaggcgctgtatgcgcaattacaccccataaaagaatccattttctggcgtcaggttgacggcggacatgatgcgctttgttggcgcggtggcttgatgcaggggctaatcgacctctggcaaccacttttccatgacaggagttgaatatggcattcagtaatcccttcgatgatccgcagggagcgttttacatattgcgcaatgcgcaggggcaattcagtctgtggccgcaacaatgcgtcttaccggcaggctgggacattgtgtgtcagccgcagagtcaggcgtcctgccagcagtggctggaagcccactggcgtactctgacaccgacgaattttacccagttgcaggaggcacaatgagccagcatttacctttggtcgccgcacagcccggcatctggatggcagaaaaactgagtgaattaccctccgcctggagcgtggcgcattacgttgagttaaccggagaggttgatagcccattactggcccgcgcggtggttgccggactagcgcaagcagatacgctgcggatgcgttttacggaagataacggcgaagtctggcagtgggtcgatgatgcgctgacgttcgaactgccagaaattatcgacctacgaaccaacattgatccgcacggtactgcgcaggcattaatgcaggcggatttgcaacaagatctgcgcgtcgatagcggtaaaccactggtctttcatcagctgatacaggtggcggataaccgctggtactggtatcagcgttatcaccatttgctggtcgatggctttagtttcccggccattacccgccagatcgccaatatttactgcacatggctgcgtggcgaaccaacgcctgctagcccatttacgcctttcgctgatgtagtggaagagtaccagcaataccgcgaaagcgaagcctggcagcgtgatgcggcattctgggcagaacagcgtcgtcaactgccgccgcccgcgagtctttctccggcacctttaccggggcgcagcgccagcgcagatattctgcgcctgaaactggaatttaccgacggggaattccgccagctggctacgcaacttagtggtgtgcagcgtaccgatttagcccttgcgctggcagccttgtggctggggcgattgtgcaatcgtatggactacgccgccggatttatctttatgcgtcgactgggcagcgcggcgctgacggctaccggacccgtgctcaacgttttgccgttgggtattcacattgcggcgcaagaaacgctgccggaactggcaacccgactggcagcacaactgaaaaaaatgcgtcgtcatcaacgttacgatgccgaacaaattgtccgtgacagcgggcgagcggcaggtgatgaaccgctgtttggtccggtactcaatatcaaggtatttgattaccaactggatattcctgatgttcaggcgcaaacccataccctggcaaccggtccggttaatgaccttgaactggccctgttcccggatgtacacggtgatttgagtattgagatcctcgccaataaacagcgttacgatgagccaacgttaatccagcatgctgaacgcctgaaaatgctgattgcccagttcgccgcggatccggcgctgttgtgcggcgatgtcgatattatgctgccaggtgagtatgcgcagctggcgcagctcaacgccactcaggttgagattccagaaaccacgcttagcgcgctggtggcagaacaagcggcaaaaacaccggatgctccggcgctggcagatgcgcgttacctgttcagctatcgggaaatgcgcgagcaggtggtggcgctggcgaatctgctgcgtgagcgcggcgttaaaccaggggacagcgtggcggtggcactaccgcgcagcgtctttttgaccctggcactccatgcgatagttgaagctggagcggcctggctaccgctggataccggctatccggacgatcgcctgaaaatgatgctggaagatgcgcgtccgagcctgttaattaccaccgacgatcaactgccgcgctttagcgatgttcccaatttaacaagcctttgctataacgccccgcttacaccgcagggcagtgcgccgctgcaacttagtcaaccgcatcacacggcttatatcatctttacctctggctccaccggcaggccgaaaggggtaatggtcgggcagacggctatcgtcaaccgcctgctttggatgcaaaatcattatccgcttacaggcgaagatgtcgttgcccaaaaaacgccgtgcagttttgatgtcagcgtgtgggagtttttctggccgtttatcgcaggggcaaaactggtgatggctgaaccggaagcgcaccgcgacccgctcgctatgcagcaattctttgccgaatatggcgtaacgaccacgcactttgtgccgagcatgctggcggcatttgttgccagcctgacgccgcaaaccgctcgccagagttgcgcgacgttgaaacaggttttctgtagtggtgaggccttaccggctgatttatgccgcgaatggcaacagttaactggcgcgccgttgcataatctatatggcccgacggaagcggcggtagatgtcagctggtatccggcttttggcgaggaactggcacaggtgcgcggcagcagtgtgccgattggttatccggtatggaatacgggtctgcgtattcttgatgcgatgatgcatccggtgccgccgggtgtggcgggtgatctctatctcactggcattcaactggcgcagggctatctcggacgccccgatctgaccgccagccgctttattgccgatccttttgccccaggtgaacggatgtaccgtaccggagacgttgcccgctggctggataacggcgcggtggagtacctcgggcgcagtgatgatcagctaaaaattcgcgggcagcgtatcgaactgggcgaaatcgatcgcgtgatgcaggcgctgccggatgtcgaacaagccgttacccacgcctgtgtgattaaccaggcggctgccaccggtggtgatgcgcgtcaattggtgggctatctggtgagccaaagcggcctgccgttggataccagcgcattgcaggcgcagcttcgtgaaacattgccaccacatatggtaccggtggttctgctgcaacttccacagttaccacttagcgccaacggcaagctggatcgcaaagccttaccgttgcctgaactgaaggcacaagcgccagggcgtgcgccgaaagcgggcagtgaaacgattatcgccgcggcattcagcagcttgctggggtgtgacgtgcaggatgccgatgctgatttcttcgcgcttggcggtcatagcctactggcaatgaaactggcagcgcagttaagtcggcaggttgcccgccaggtgacgccggggcaagtgatggtcgcgagtactgtcgccaaactggcaacgattattgatgctgaagaagacagcacccggcgtatgggattcgaaaccattctgccgttgcgtgaaggtaatggcccgacgctgttttgtttccatcctgcgtccggttttgcctggcagttcagcgtgctcagccgttatctcgatccacaatggagcattatcggcattcagagtccgcgccccaatggccccatgcagacggcggcaaacctggatgaagtctgcgaagcgcatctggcaacgttacttgaacaacaaccgcatggcccttattacctgctggggtattcccttggcggtacgctggcgcagggtattgcggcgcgactgcgtgcccgtggcgaacaggtggcatttcttggcttgctggatacctggccgccagaaacgcaaaactggcaggaaaaagaagctaatggtctggacccggaagtgctggcggagattaaccgcgaacgcgaggccttcctggcagcacagcagggaagtactagtacggagttgtttaccaccattgaaggcaactacgctgatgctgtgcgcctgctgacgactgctcatagcgtaccgtttgacggtaaagcgacgctgtttgttgctgaacgcacacttcaggaaggtatgagtcccgaacgcgcctggagcccgtggatagcggagctggatatctatcgtcaggattgtgcgcatgtggatattatctctccagggacgtttgaaaaaattgggccgattattcgcgcaacgctaaacaggtaaattaatattatttataaacccataattacagaaaataattatgggttttttatttgtttgatttataggtttgatgaatatttctcttaaatagagtgaatgttgcattcagtggaaggaatttacaaacttcagcttcggataattatcaccaactggtaaagtgagcgccgtggagatttccccctattggactcattttcaggttataccccatgagtagtctgaatattaaacagggaagtgacgctcattttcccgattatcctctggcgagccccagtaataatgaaattgatttacttaatctaatcagtgttttatggcgggccaaaaaaacggtcatggcggtcgtttttgcgtttgcctgcgcaggcttgctgatctctttcatcctgccgcaaaaatggaccagcgcggcggttgtcacgcctccagaacctgttcagtggcaagagttggagaaaagtttcactaagcttcgtgtgctggatctggatatcaaaattgatcgtacagaagcatttaacctgtttatcaagaagtttcagagcgttagcttgctggaagagtacctgcgtagtagtccttatgtgatggaccaattaaaagaggcgaaaatcgacgaactggatttgcatcgcgcaattgtcgcattgagcgaaaaaatgaaagcggttgatgacaatgccagtaagaaaaaagatgaaccgagtctgtatacctcctggacgctaagttttaccgcgccaaccagtgaagaggcgcagaccgttttgagcgggtatatcgattatatctctacgttggtggtgaaagagagcctagaaaacgtccgtaataaactggagatcaaaacccagtttgaaaaagaaaaactggctcaggatcgcattaaaacgaaaaatcaacttgatgcaaacattcagcgcctcaattatagtctcgacattgccaacgcggcaggaattaaaaagcccgtttacagtaatggtcaggccgttaaagatgaccccgatttttctatttctctcggtgcagacggtattgaacgcaaactggaaatagaaaaagcggtcactgacgttgcggaactgaacggtgaattacgtaatcggcagtatcttgtcgagcaattaacaaaagcacatgtcaacgatgtgaattttacgccgtttaaatatcagttaagcccgagtttgccagtgaaaaaagacggtccgggtaaggcgattattgtgatcctttccgcgttgatcggcgggatggtggcttgtggtggcgtgctgttgcgctatgcgatggcatccagaaaacaggatgccatgatggcagaccacttagtttaactatttgcggtactaggtgccgttcgtccgagcggcaccacaagcggcgttccggcaactggatcgtcaatgatcatgcagcgcagaccataaatgcgctcaatcagttcagcagtgacaatctccttcggcgctccctgagcaacaattttcccttcccgcaatgcaatcaaatggctggcgtaacgacaggcctgattaagatcgtgcagcaccgccgccagggtatagcctttttcgcggttcagttcgcttaacaactccagcaaatcaatctgatgactgatatccagccaggtcgtgggttcgtcgagcagcataattgccgtttcctgggccagcaccatcgcgatccacgctcgctggcgttgtccgccagaaagggtatccacgctttgatctgccagatgagttattcccgtggcctgcattgctttcgttaccgcttcttcatcctctttgcgccagcgggtaaacagcggttgatgcggataacgtccacgcgccaccagctcctgcacggtgatatcgcccggcgtggtagcattttgcgccaacagaccaatccggcgtgcaacctctttactggcgtaatgttgaatgtgctcgccatccagccagacatgcccatgagcaggcgtcatcaggcggcttaaggtacgcagtaacgtggatttaccgcagccatttggcccgataattgccgtgaagtgaccatcaggtatttctacagtcagattttccgcaacggtatatttgccatatcccagggttaactgttcgccgcgcaaacgggctacactttcggtcattttttgcgagactcctgaattaacaagacgataaggtaaataccgccgaggctgacggtaacgacgccaaccggaagttgatacggcataaacagttgttgggcgcagagatcggccgccagcagtaacagcgccccgcatagcgccgcctgggttagcccccagcgagcggtgccgctaatgcgtcgggcaatgtgcggtgcgactaaagcaataaaggaaatcggcccggcaagcgctgttgccgcagcggtaagcaccactgcaaccagcatcattaacagacggctacgttcgacgctgacgcccagcgcacacgcggtatcatcgcccatttccagcaagcgcatccggcgtaccagtaaggcggcggcaatgagcatcaatataatgatgggtgcggaagggctggtttttgcccacgtcaggccgttgaggcttccggcattccacaaacctgctgttagcgccgtttctaaagacgctttcagcaacagccaggtattaaaggccaccagcatggcgcgaacgccgataccgataataatcaaccgaaaggtgtcgatgccgttgcgccaggcgagcagccagaccagcaggctagtgacaatgccgcccaccattgcactcagcgcgatagccgtcaggtcctgaccaaacagcaccatcgccaccagcacgccgctccacgccccggtgttaaagcccattacgtcagggctgccgagcgggttacgcatcaggctctgaaaaatcgcgccactgacgcccagtgctgcgccaatcaacagcgccatcagcacgcgtggtaaacgccattcggtgaccaccatcgtcatactgcgcggcgcatcgcccatcagcgcggcgaatacctggctggtttccagcgtgacggcaccgctgcgtaatccccagatacctgcaaccacacaggcggaaaccagcagcaaacaggtgatgagtaatcggcgagagacgtaaatcatgcaccacctcgcgttttacgtcgcacgaggaagatcagcaccggtgcaccaataaacgcactgaccacagaaacgcgcagttcgccgggcacaatcacccgcccgatgatatcggcaaacagcagcagggcaggggtagcaagtagcgtgacgggcaggctccagcgatgatcggcacccaccagccaacgcgccatatgcggcatcatcaggccaataaaggcaatcgggccaactattgccgtcgcactaccacaaagcacggtaatcgccagcagaccaatcaactgtgtgcgcgccacgcgactgcccagcgccgtcgcggtgtcgctgccgaggctcaaactgttcagcgcgcgactcagtaatagcgcagttgctccggcgatcagcaccgggatcagcaccacttttaaggtatgtagattgcgaatatccaggctaccggcttgccagaaacgcaactgatcgtagacgtcaggattaagcagggcgatgccgctggtcagtccttccagcaccgccgccagcgccacgcccgccagggttaaacgcaccggacttaactgcccgccgccctgactgccggtaaaggcaacaatcaaactggccaccagcgccccggcgaaggccatcgccagttgttcctgcgcggaagagtaaccaaacagcgccgcacccagcacaatggcaaagctggctccggcgttcacgccaagcaagccggggtcggcaagtgggtttcgggtgagggtttgcattaacgccccggcaaggccaagcgcgccgcctgccagtaaaccggcaagggtacgcggcagccgcgcgtcgagcacgatggtgcagtcggcgctctggcaggtgccggagaaggcctccagcactacggaagcggggagactttttgccccaatgagcaggcttaatgccgtcgcgataatcagtaataacagcaatccgggcacggcaatggcgcgtgtcacggcaacagaaccagacatacgaacttccatgataatgaaattaattatcgttatcgatcttatttggatatgttagcatgtgcagcctaagaataggtatttaaaatatttgatggcaaggcattgtaatgaataaacaatcctggctgcttaacctcagcctgttgaaaacgcacccggcgtttcgcgcagtattcctcgctcgtttcatcagtattgtgtctctgggtttgctcggcgtcgcggtgccggtgcagatccagatgatgacacattccacctggcaggtggggcttagcgtgacgctgaccggcggcgcgatgtttgttggcctgatggtcggcggtgtgctggcggatcgctatgagcgcaaaaaagtgattttgctggcgcgcggcacctgtggcattggcttcattggactgtgccttaatgcactgctgccggagccgagtttgctggcaatctatttacttggtttatgggatggttttttcgcaagccttggcgttacggcgctattggcggcgacaccagcactggtagggcgtgaaaacttaatgcaggccggggcgatcaccatgttgaccgtgcgtctggggagcgtgattagccccatgattggcggtttattgctggcgaccggtggcgtagcctggaactacgggctggcggcggcgggcacgtttattaccttgctaccgttgttaagccttccggcgttgccaccgccaccgcagccgcgtgagcatccgttgaaaagtttactggcaggatttcgttttctgcttgccagcccgctggtgggcgggattgcgctgctgggtggtttattgacgatggcgagcgcggtgcgggtactgtatccggcgctggctgacaactggcagatgagtgcggcacagattggttttctctacgcggcgatcccgctcggcgcggctattggtgcgttaaccagcgggaagctggcacatagtgcgcgaccagggttattgatgctgctctccacgctgggaagcttcctcgccattggtctgtttggcctgatgccgatgtggattttaggcgtggtttgtctggcgctgttcggctggttgagtgcggtcagcagcttgctgcaatacacaatgctgcaaacgcaaaccccggaagcgatgttagggcggattaacggtttgtggacggcgcagaacgtgacgggcgatgccataggcgcggcgctgctgggtggtttgggcgcgatgatgacaccggttgcttccgcaagcgcgagcggttttggtttgttgattatcggcgtgttgttattgctggtgctggtggagttgcgacattttcgccagacgccgccgcaggtgacagcgtccgacagttaatgcttaaaacagcgccttaagcctatccagcacttgcatggcgctgtagtaatccagacggaacgtctcggttcccagcgcataaacctgcttgttttgtactgcaggcaggtgcgcgagcagcggattagcataaatagcatcggcatctttctgatcaccggcgaacaggaatagactctcgccatttaaccctgcagccagattttccccaccaagctgaatgatgtcatggcgtttaccctgactttggctggcatttaaccctgcgggtaacttcgccagcgtaaagccgagttgttccagcatctgcccttgtgcactttctggcgtccagagattggcactgtgtgcagcggcagtatagacaatggcagtgaccggctgcggcggtaatttgatttgctctttcgccgccgccagttgcttatcaaactgcgcaatccgctctgccgcttgtttctcatgcccggtaatttcgccaagttgcgttaacaggctctgccagcttttgtcgtcgtaattgatgattaatgtcggggcgatggtggaaagctgatcatacagtgccagcgcgctatccccgccggttgcgctaattaaaatcagatccggcatttgcgcggcaacggcttcggcgctcggttcgccgatatagagccgttgcagtttgcgttctttcgccaccttgctccactggcgtaaaaagccctggtcatccgcgacgcggttattcggcgtggtcgcgccgctggcgatcaccggagcatcaatcgccagcagactgccggtcagggtgacgctggtggaaacaatacgctgcggctggctttccagtgtatgtgtgccacggctgtcagtaatctgacgcggccagtcagcggcctgaactgcggctattccactaagcaaaagtcctgttaatagaagggcgttgcggtagagcggggcgagtctcacaaatcagcttcctgttattaataaggttaagggcgtaatgacaaattcgacaaagcgcacaatccgtcccctcgcccctttggggagagggttagggtgaggggaacagccagcactggtgcgaacattaaccctcaccccagccctcaccctggaagggagagggggcagaacggcgcaggacatcacattgcgcttatgcgaatccatcaataatgcttctcattttcattgtaaccacaaccagatgcaaccccgagttgcagattgcgttacctcaagagttgacatagtgcgcgtttgcttttaggttagcgaccgaaaatataaatgataatcattattaaagcctttatcattttgtggaggatgatatggatacgagtctggctgaggaagtacagcagaccatggcaacacttgcgcccaatcgctttttctttatgagcccgtaccgcagttttacgacgagtggatgtttcgcccgcttcgatgaaccggctgtgaacggggatagccccgacagtcccttccagcaaaaactcgccgcgctgtttgccgatgccaaagcgcagggcatcaaaaatccggtgatggtcggggcgattcccttcgatccacgtcagcctagcagcctgtatattcctgaatcctggcagagcttctcccgtcaggaaaaacaagcttccgcacgccgtttcacccgcagccagagcctgaatgtggtggaacgccaggcaattccggagcaaaccacgtttgaacagatggttgcccgcgccgccgcacttaccgccacgccgcaggtcgacaaagtggtgttgagtcggttgattgatatcaccactgacgccgccattgatagtggcgtattgctggaacggttgattgcgcaaaacccggttagttacaacttccatgttccgctggctgatggtggcgtcctgctgggggccagcccggaactgctgctacgtaaagacggcgagcgttttagctccattccgttagccggttccgcgcgtcgtcagccggatgaagtgctcgatcgcgaagcaggtaatcgtctgctggcgagtgaaaaagatcgccatgaacatgaactggtgactcaggcgatgaaagaggtactgcgcgaacgcagtagtgagttacacgttccttcttctccacagctgatcaccacgccgacgctgtggcatctcgcaactccctttgaaggtaaagcgaatagccaagaaaacgcactgactctggcctgtctgctgcatccgacccccgcgctgagcggtttcccgcatcaggccgcgacccaggttattgctgaactggaaccgttcgaccgcgaactgtttggcggcattgtgggttggtgtgacagcgaaggtaacggcgaatgggtggtgaccatccgctgcgcgaagctgcgggaaaatcaggtgcgtctgtttgccggagcggggattgtgcctgcgagcagtccgttgggtgagtggcgcgaaacaggcgtcaaactttctaccatgttgaacgtttttggattgcattaaggagcgaggatgagcattccattcacccgctggccggaagagtttgcccgtcgctatcgggaaaaaggctactggcaggatttgccgctgaccgacattctgacgcgacatgctgcgagtgacagcatcgcggttatcgacggcgagcgacagttgagttatcgggagctgaatcaggcggcggataacctcgcgtgtagtttacgccgtcagggcattaaacctggtgaaaccgcgctggtacaactgggtaacgtcgctgaattgtatattacctttttcgcgctgctgaaactgggcgttgcgccggtgctggcgttgttcagccatcagcgtagtgaactgaacgcctatgccagccagattgaacccgcattgctgattgccgatcgccaacatgcgctgtttagcggggatgatttcctcaatactttcgtcacagaacattcctccattcgcgtggtgcaactgctcaacgacagcggtgagcataacttgcaggatgcgattaaccatccggctgaggattttactgccacgccaagtcctgctgatgaagtggcctatttccagctttccggtggcaccaccggcacaccgaaactgatcccgcgcactcataacgactactactacagcgtgcgtcgtagcgtcgagatttgtcagttcacacaacagacacgctacctgtgcgcgatcccggcggctcataactacgccatgagtagcccaggaagcctgggcgtctttcttgccggaggaacggttgttctggcggccgatcccagcgccacgctctgtttcccattgattgaaaaacatcaggttaacgttaccgcgctggtgccacccgcagtcagcctgtggttgcaggcgctgatcgaaggcgaaagccgggcgcagcttgccagcctgaaactgttacaggtcggcggcgcacgtctttctgccacccttgcggcgcgtattcccgctgagattggctgtcagttgcagcaggtgtttggcatggcggaagggctggtgaactacacccgacttgatgatagcgcggagaaaattatccatacccagggttacccaatgtgtccggatgacgaagtatgggttgccgatgccgaaggaaatccactgccgcaaggggaagtcggacgcctgatgacgcgcgggccgtacaccttccgcggctattacaaaagtccacagcacaatgccagcgcctttgatgccaacggtttttactgttccggcgatctgatctctattgatccagagggttacatcaccgtgcaggggcgcgagaaagatcagattaaccgtggcggcgagaagatcgctgccgaagagatcgaaaacctgctgctgcgccacccggcggtgatctacgccgcactggtgagcatggaagatgagctgatgggcgaaaaaagctgcgcttatctggtggtaaaagagccgctgcgcgcggtgcaggtgcgtcgtttcctgcgtgaacagggtattgccgaatttaaattaccggatcgcgtggagtgtgtggatagtcttccgctgacggcggtcgggaaagtcgataaaaaacaattacgtcagtggctggcgagtcgcgcaagtgcctgaaggagagaacacgatggctattccaaaattacaggcttacgcactgccggagtctcacgatattccgcagaataaagttgactgggcctttgaaccgcaacgtgccgcgttgttaatccatgatatgcaggactattttgtcagcttctggggcgagaactgcccgatgatggagcaggtgatcgcgaatattgctgcgctgcgcgactactgcaaacagcacaatatcccggtttattacaccgcccagccgaaagagcagagcgatgaagatcgggcgctgttgaatgatatgtgggggccgggcctgacccgcagcccggaacagcaaaaggtggtggatcgcctgacgccagatgccgacgacacggtgctggtgaagtggcgctacagcgcgtttcatcgttctccgctggagcaaatgctgaaagagagtggacgtaaccagctgattattaccggggtatatgcccacattggctgtatgaccaccgcaaccgacgcatttatgcgcgatattaaaccgtttatggtggcggatgcgctggccgatttcagccgtgacgagcatttgatgagcctgaaatatgtggccggacgttctggccgggtggtgatgactgaagaattactgccagcacctatccccgccagcaaagcggcgctgcgtgaggtgatcctgccgttgctggacgagtccgatgaaccgttcgatgacgacaacctgatcgactacggtctggatagcgtgcgcatgatggcgctggcggcgcgctggcgcaaagtgcatggtgatatcgactttgtcatgctggcgaaaaacccgaccatcgacgcctggtggaagctactctcccgcgaggtgaaataatggatttcagcggtaaaaatgtctgggtaaccggcgcaggtaaaggtatcggctacgccacggcgctggcgtttgttgaggcgggagcgaaagttacaggttttgatcaagcgttcactcaggagcaatatccctttgcgaccgaagtgatggatgttgccgacgctgcgcaggtcgcgcaagtgtgtcagcgactgttagctgaaacggagcgactggacgcgctggtcaatgcggcgggaattttacgcatgggcgcgaccgatcagctcagtaaagaggactggcagcagacttttgcggttaacgtcggcggtgcgtttaacctgttccagcaaaccatgaaccagtttcgccgtcagcggggcggggcgattgtcactgtggcgtccgacgccgcgcacacgccgcgtattggcatgagtgcttatggcgcaagcaaagcggcgctgaaaagcctggcgttgagcgtcgggctggaactggcgggtagcggcgtgcgctgtaatgtggttagccctggctccaccgacaccgatatgcaacgcacgctgtgggtgagcgatgacgccgaagaacagcgtattcgcggctttggcgagcagtttaaactcggcattccgctggggaaaatcgcccgtccacaagagatcgccaacacgattttgttcctcgcctctgacctcgccagccatattaccctacaggatattgtggtcgatggcggcagtacgctgggggcataagcatgatctggaaacgccatttaacgctcgacgaactgaacgccaccagcgataacacaatggtggcgcatctgggaattgtgtatacccgtctgggcgatgatgtgctggaagccgaaatgccggttgatacccgtactcatcagccgttcggtttactacatggcggcgcgagcgcggcgctggcggaaacgctgggaagcatggccggatttatgatgacccgcgacggacagtgtgtggtaggcacagaacttaatgcaacacaccatcgcccggtgtctgagggaaaggtacgcggcgtctgccagccgctgcatcttggtcggcaaaatcagagctgggaaatcgtcgttttcgatgaacaggggcggcgttgctgcacttgtcggctgggtacggcagttttgggatgaacccgacagaattagatgagattgcaggaaaactcggttaacggagtgatcgagttaacattgttaagttaaatattggtttcaactccgatttacatggttgctgtgttgttaaattgtacaaagatgttatagaaacaaaatgtaacatctctatggacacgcacacggataacaactatgaacaaaagtgggaaatacctcgtctggacagtgctctctgtaatgggagcatttgctctgggatacattgctttaaatcgtggggaacagatcaacgcgctgtggattgtggtggcgagcgtctgtatctatctgatcgcttaccgtttttatgggctgtatatcgccaaaaatgtgctggcggttgacccgacgcgtatgacgccagcggtgcgccataacgacgggctggactatgtgccgacggacaagaaagtgctgttcggtcaccattttgcggccattgccggagcaggtccgctggtggggccggtactggcggcgcaaatgggctacctgccggggatgatctggctgctcgctggggtggttctcgccggtgcggtgcaggatttcatggtgctgtttgtttctacgcgccgtgacggtcgcagcctgggtgagctggtcaaagaagagatggggccaaccgccggggtgattgcgctggtggcctgctttatgatcatggtcattatccttgcagtgctggcgatgatcgtggtgaaagccctgactcatagcccgtggggaacatataccgttgcgttcaccattccgctggcgctgtttatggggatctacctgcgctatctgcgtccggggcgtattggcgaagtgagcgtcatcggtctggtattcctgattttcgccattatctctggcggctgggtggcagaaagtccgacctgggcaccgtactttgactttaccggcgtgcagttgacctggatgctggtgggttacggttttgtggcggcggtgctgccggtgtggttactgctggccccgcgtgactacctctctaccttcctgaaaatcgggactatcgtcggtctggcggtaggcattttgattatgcgcccgacgctgaccatgcctgcgctgaccaaatttgtcgatggcactggcccggtatggaccggtaacctgttcccgttcctgtttatcaccatcgcctgtggcgcggtgtctggcttccatgcgctgatctcttctgggaccacgccgaagatgctggcgaacgaagggcaggcgtgctttatcggctacggtgggatgttaatggaatccttcgtggcgattatggcgctggtttccgcctgtatcatcgatccgggcgtgtattttgccatgaacagcccgatggcggtgctggctccggcagggacggcggatgtggtcgcttctgccgcgcaggtggtgagtagctggggctttagcattacaccagatacgctaaaccagattgccagcgaagtgggtgaacagagcatcatttcccgtgcgggcggtgcgccgacgctggcggtggggatggcctacattctgcacggcgcgctgggcggcatgatggatgtggcgttctggtatcacttcgccattttgtttgaagcactgtttattctgacggcggtggatgcaggtacgcgtgctgcgcgctttatgttgcaggatctgctgggcgtggtgtctcctggcctgaagcggaccgatagtctgcctgctaacctgctggcaacagcgctgtgcgtactggcgtggggctacttcctccatcagggcgtggtcgatccgctgggcggcattaacactctgtggccgctgtttggtattgccaaccagatgctggcagggatggcgctgatgctctgtgccgtggtgttgttcaagatgaaacgtcaacgttacgcctgggtggcgctggtaccaacggcctggctgctgatttgtaccctgaccgcaggctggcagaaagcgtttagcccggatgcgaaagtcggcttcctggccattgctaataagttccaggcaatgatcgacagcggcaatattccgagccagtatactgagagtcagctggcgcaactggtgttcaacaaccgtctggatgccgggttaaccatcttctttatggtggtcgtggtggttctggcactgttcagcattaagacggcacttgcggcattgaaagatccgaagccaacggcgaaagaaacgccgtatgaaccaatgccggaaaatgtcgaggagatcgtggcgcaggcaaaaggcgcacactaaagtcagagtgagggggggatgttggcgaatgttggcttagtgcccagggttccctctcaccctaaccctctccccggtggggcgaggggactgaccgagcgcgttgatagcatttgtaggccggataaggcgttcacgccgcatccggcactctttcagcaacatggttagcggaggccaagatgtttgatagtctggcaaaagccggaaaatatttaggtcaggcggcgaagctgatgattggtatgcctgattacgacaactatgtcgaacatatgcgggttaaccatcccgatcaaacgccgatgacctacgaagagtttttccgtgagcggcaggacgcgcgctacggtggaaaaggcggcgcgcgctgctgctaaatttgtacgtcaggctttaaagctttccacttttttgaacgctgcacgcaacgtatctggtgtcagcgtgactggcaggtaatgaatggactccaccggacgcagggtgtgggcaatcactttgtcgatctccgcctgattattgatatccacttccagctccgccagtgtagtcggcagatgaaaacgctgatacgctccagttaattgcgccagcacatcatcctgacccagcaaggcgctttgcaccagaattccgtaggcgactttggtgccgtggagaaacttctcggtttgcggcagcacggtcagaccgttatgcacggcatgagctgccgccacacgcgtaaaacgatcgcccagaccaccaaccatcccaccaccagcaataatagcatccaccacatcgcaaaaactttgcgttaactgttgattttgctgatcgctcagcgcctgttcgctactgtttaacaagacgtcgcgaatggcttgcgcattattgatccccagtcgcacggttagcggcaacgtttctggttgcggagccagcaccaccgcttcataccatttcgccagcgtgtcaccgatccccgccagcagatattgttgcggtgcattgaggataatctccggttccaccagcaccataaaattggcgtcgtcgaaaatctcataatgcagcgcctgtccggcatcattataccagacggagagcggtgtccaggcggcgcaggtggcggcgatcgtcggaacggcaacaaacggcagaccgagacggcgggcgagggctttcgcggtgtcgagcagtgcaccgccaccgacgccaatcaccacgctgcggtcgtcaccggactcagccgccagttgttgtacatcgctttcgctgcaatgaccgcgaaacaaaatatgctttgcccctggcagtccaaacgctggcggaagtttggtttgcgccgcagcaatggcgcgtttgccgtagatccacaccgcgcgagaaagttgttcatcagtgaaaaaatcgtgcaggtgattgaaacttcctggatgactaaagtagttagccgggccgacgaccacgcggataggattgtgaggcatgttgtgttgtccttattgttttatttagacatctaaacgtcttgattgccaaatactagcatcgtgttatagtgccttcaacacgcaacttcgtcaggtacaataaaaatgacaaataaccctctgattccacaaagcaaacttccacaacttggcaccactattttcacccagatgagcgcgctggcgcagcaacaccaggcgattaacctgagccaaggctttcctgattttgatggtccgcgctatttacaggagcggctggcgcaccacgttgcacagggggcaaaccaatacgcgcccatgaccggcgtgcaggccttgcgcgaggcgattgctcagaaaacggaacgtttgtatggctatcaaccagatgccgatagcgatatcaccgtaacggcaggggcgacggaagcgttatacgcggcgattaccgcactggtgcgcaatggcgatgaagtgatttgttttgatcccagctatgacagttacgcccccgccatcgcgctttctgggggaatagtgaagcgtatggcactgcaaccaccgcattttcgcgttgactggcaggaatttgccgcattattaagcgagcgcaccagactggtgatcctcaacactccgcataaccccagtgcaactgtctggcagcaggctgatttcgccgctttgtggcaggcgatcgccgggcacgagatttttgtcattagcgatgaagtctacgagcacatcaactttagtcaacagggccatgccagtgtgctggcgcatccgcagctgcgtgagcgggcagtggcggtttctagttttggcaagacctatcatatgaccggctggaaagtgggttattgtgttgcgccagcgcccatcagcgccgaaattcgcaaggtacatcagtatctgacctttagcgtgaataccccggcacagctggcgcttgctgatatgctacgtgcagaacctgagcattatcttgcgttaccggacttttatcgccagaagcgcgatattctggtgaatgctttaaatgaaagccggctggagattttaccgtgtgaaggtacatactttttgctggtggattacagcgcggtttctaccctggatgatgttgagttttgccagtggctgacgcaggagcacggcgtagcggcgattccgctgagcgtgttttgcgccgatcccttcccacataaactgattcgtctctgttttgccaagaaggaaagcacgttgctggcagcagctgaacgcctgcgccagctttaattatttaaccgtccaggcgcgggaatattgacggtcggcaaacaactcttgcaggccgttaatttgcttcaggcgcagcacttcgtcgctgtccattcccagctctttgccaattttattatcgtcccatcccaactggctaagttcacggacgatttcgctcatggcggtgatttgatggcgtccacgagcgcgattatgacgaatagtcgcggcgatgcgttgattacgcgtaccttccagacaggtcaccggcaaataaccttttaagcgtaattttaaactactactgcctttaccaatttcatggcggtgaaaaccatccacgatttccatggcatttttatccgtatgtgtgaccacaatgggttgggtaaaaccatctatttcaatggatttttgcagcagttttttttcgggtggtgccacgttgtttgggttgtaatcattaggcataagttggctgtttttaacccacagaacgcaatccactggctcttcacgaaaggggctaacctgatggatcgccatgcggatttcattaatcgctttgatgcgatcatcttccggcaagctggcgagaaattgcgttaaatcctgcgttaatcgttgttgcatagtatcccccattcctgacgttttccttttatccgttcgttataacgctgatagttcttgctttttgtggggctaaaacttaatgcccgacaccagtaatcgttattgagtaaaactttgcatatccgccgccaggaggggatatctttcgcgccaatgtccccttgctgggtttgtggaacctcgatgccttttttctgataccagtgcaaataaatggcgattttattgcggtaatgctcagctgttttttccggcatgctattgagcagcaataatgcatattcttgccagtctaaatgttctggcttgaggattttccgatgcccatagaaatgattgtcatgtccggcgtaaatgccgccactttttaccccgctgactcgtgcgcacatagcagcccagcgatccggttcgataacgtgatagagccataatccttgtcgttgctccgggccaaaaggttcgcaaattcgcatatgacgcagaggaacgcctgcctgatacattaggttatacagtgggttgcagagactttgatgatttgcataccaggtccagatatcagccactttccagtcgtaaatggggtaaatgtaccagctatgaccgcctggtgcggccgtagtccagggtttatcgtcggcaaaacgttgtttatttaaactggcgatggcgacaaaacggttgtaggactcatccgcacggatgccgatcatcatcgccgccggacgtttttgactaaaccattcggcaaactcacgtacaaattgttcgaaggtcatgcctggctggtaaaagcagaaaaagtcagggtcggttatcgcatcttggggaggttgacgtacccattcgacatcaggttcccagcactgccattcgggttggtattgactaagggaattttgcgtcgtaagcgggagcgcaacccagtaaaactcttcgatgacatcggtgtacaactcgcgcagggactgaacatagttaatggtgcaagagaattgcgcctcccagtcgataaacaaaacgcagatttttttgcccatttgtcgggcaagttcggctgtcagatgcagcattaaaccagagtctttgccgccagaaaaactgacacaaacgcggggtagggtgttgagtgtccaggtaatacgctctcgtgcagcttccagaatattgagcggaagaggaattttataaatagacatctgaagacgctctctgaacgttacagggtgatcagtgagataagtctgttaattataaagtaaacactgtaaagcagagtgttttatttttcattcgcgctgtgaataaatagatgaaagttatagtagctgtctgtagttatatatcaaaaactctcatttagacggtcaataaatcgggagaacaccaaattatttaaagaagatttattataggaaatgtaaagctttatactaggtaacggatgttctagttttatctcttttaagttaagaaagtcacggtaggaattataaagttcataggggactattcccagtaaatctgtaactgcaatgctattaatgattgtcagcaaagaggaaccacgaaaactgattttgcgattcataaatctctcgtctatttccatttgaatatcatcaacccctgcacttttagatattaattgggtgaactcttctgccataatttgttcataagtgctattgtcagtaattcgtggatgcctattactacaaattagagtattgcgaatcgtatgcaatggcatgcaaatgacggaacggctgatcactggcatttgggtgatcaccagatcggctttgcggtgaaccaacagttcttcagcattctctgcactcatgaggatatcatggcactcaatctcgacagaggaatcttgccgtaggcagcggatcagcatactattattagagcaagaaatgagctgagggccgtagataataaagtttttctttagttcggacttattgactatattaattgtttgttcaaggcctctgagatttttctcaagatggtgatgcagatttaaccctgttgtcgtcggcgcgataccttttccactgcgaatgaataaagggtcattaaattgcgcacgtaagcgttgtaagctctggctcacggcacttggggtgatatatagactttcagcagctttgctaatgcttaaatgctggtaaatacactcaaatatgacaagaagatttaagtcgaactttttcaagtcgtagagattggccatacactactccggttatatttttcttccatgatatattcacttaatcaatgttttttgcgtatatatttttattgattatgtttttttgcttaactcaggattaagtttttctaaaatagcacagccacttagggcagagcgagcaattcatgcttttttaggatggttgaaaagcagggatatagttcaaccatccatgaattaccttttatttattccccataatgatattaagcgttttctgatcgggcaaccccacggcctgttgtagcgtattttccttactcatgtaatagatagccggcgtgacatttgcccccagatcgtccatcagtttctcattgtcacttaacactttcatttgctctgtacttacgtttgcaggcacgtttagcttaagcttgccaccagaggcttcatattgttgccaggtttttgcgggatctttggaggcaagaattgccgctgctgtcgccgggctttctggcttgataaccccaaccaacaatgttcttaattgcactttgccagaatctacccacgggcgcgcctgctgccagaactgtttacaatatgggcagaacggatcggcgaagacgtagacaatgaccggcgcatcttttttaccgtcgaggagccagtgggattgttccatccgttgccacatttcgcgtccggctggtgcgtaaatttctttttcgataagtgtgttactcaggttttcacctttctcgttgtacatgtaaccagagatagcgtgcttaccatctggagtcaggtagatggtgacgcccatatcctgatactttccgagataacctttcattcctccgggggcatcgaatgttttgatgattgtaatgccctgtttttcaatcgcttttactggagcaggaagttcctctgcgaaggcgattgcaggaagcagagccagtaaaagtatcttttttaacattaatttgtccttttcagtcagtgcaaaagtcgagtaaaaggcataacctatcactgtcataggtaagagcttagatcaggtgattgccctttgtttatgagggtgttgtaatccatgtcgttgttgcatttgtaagggcaacacctcagcctgcaggcaggcactgaagataccaaagggtagttcagattacacggtcacctggaaagggggccattttactttttatcgccgctggcggtgcaaagttcacaaagttgtcttacgaaggttgtaaggtaaaacttatcgatttgataatggaaacgcattagccgaatcggcaaaaattggttaccttacatctcatcgaaaacacggaggaagtatagatgtccttgattaacaccaaaattaaaccttttaaaaaccaggcattcaaaaacggcgaattcatcgaaatcaccgaaaaagataccgaaggccgctggagcgtcttcttcttctacccggctgactttactttcgtatgcccgaccgaactgggtgacgttgctgaccactacgaagaactgcagaaactgggcgtagacgtatacgcagtatctaccgatactcacttcacccacaaagcatggcacagcagctctgaaaccatcgctaaaatcaaatatgcgatgatcggcgacccgactggcgccctgacccgtaacttcgacaacatgcgtgaagatgaaggtctggctgaccgtgcgaccttcgttgttgacccgcagggtatcatccaggcaatcgaagttaccgctgaaggcattggccgtgacgcgtctgacctgctgcgtaaaatcaaagcagcacagtacgtagcttctcacccaggtgaagtttgcccggctaaatggaaagaaggtgaagcaactctggctccgtctctggacctggttggtaaaatctaaatttccttcgtctttcacgccatagcggcgttggcgtcgcccgctcaccccggtcacttacttgtgtaagctcccggggattcacaggctagccgccttgctctgacgcgaaatacttcggaaattcacctaattcttcgggtgctgcggcacccgattttcttccccgcaccatgatgcaagctgcatccaggtagccgcagaggccgcttgcatgatgatgtttaaagcccaggagataaacatgctcgacacaaatatgaaaactcaactcaaggcttaccttgagaaattgaccaagcctgttgagttaattgccacgctggatgacagcgctaaaagcgcagaaatcaaggaactgttggctgaaatcgcagaactgagtgacaaagtcacctttaaagaagataacagcttgccggtgcgtaagccgtctttcctgatcaccaacccaggttccaaccaggggccacgttttgcaggctccccgctgggccacgagttcaccagcctggtactggcgttgctgtggaccggtggtcatccgagcaaagaagcgcagtctctgctggagcagattcgccatattgacggtgattttgaattcgaaacctattacagcctctcttgccacaactgcccggacgtggtgcaggcgctgaacctgatgagcgtactgaacccgcgcatcaagcacactgcaattgacggcggcaccttccagaacgaaatcaccgatcgcaacgtgatgggcgttccggcagtgttcgtaaacgggaaagagtttggtcagggccgcatgacgttgactgaaatcgttgccaaaattgatactggcgcggaaaaacgtgcggcagaagagctgaacaagcgtgatgcttatgacgtattaatcgtcggttccggcccggcgggtgcagcggcagcaatttactccgcacgtaaaggcatccgtaccggtctgatgggcgaacgttttggtggtcagatcctcgataccgttgatatcgaaaactacatttctgtaccgaagactgaagggcagaagctggcaggcgcactgaaagttcacgttgatgaatacgacgttgatgtgatcgacagccagagcgccagcaaactgatcccagcagcagttgaaggtggtctgcatcagattgaaacagcttctggcgcggtactgaaagcacgcagcattatcgtggcgaccggtgcaaaatggcgcaacatgaacgttccgggcgaagatcagtatcgcaccaaaggcgtgacctactgcccgcactgcgacggcccgctgtttaaaggtaaacgcgtagcggttatcggcggcggtaactccggcgtggaagcggcaattgacctggcgggtatcgttgagcacgtaacgctgctggaatttgcgccagaaatgaaagccgaccaggttctgcaggacaaactgcgcagcctgaaaaacgtcgacattattctgaatgcgcaaaccacggaagtgaaaggcgacggcagcaaagtcgttggtctggaatatcgagatcgtgtcagcggcgatattcacaacatcgaactggccggtattttcgtccagattggtctgctgccgaacaccaactggctcgaaggcgcagtcgaacgtaaccgcatgggcgagattatcattgatgcgaaatgcgaaaccaacgtgaaaggcgtgttcgcagcgggtgactgtacgacggttccgtacaagcagatcatcatcgccactggcgaaggtgccaaagcctctctgagtgcttttgactacctgattcgcaccaaaactgcataagaagaagtaagattcacctgcaattgcttagccgccggggtcaaacctggcggcttttttatggcattaaaaagccccgccgggatggctccgggcagggcgggatacttattctggcaattaacgcacaaccagcaccggcagattggcgtggcggatcacgctgctggcgttagaacctaacagatgggtgctaatgcttgggttgcgagaaccaataactacaacatcagcccccagttcttctgccaactcattgacttcatcccgcacgctaccaaaacggacatgttgtttaatgcgggaaggatcgatggtgaagtggctgaccatcgtttgcagacgttcttgtgcttcatgttgcagatgctcttcaaaacgacgcacatcagcggcaaaacggtgcaggctcaggctggcactcccgggtagtacgtgaagtagatgaataactccgtcatcctgggcgaggaattcagcgtggcgaacagctttgtcgctcaattccatttcaaatacatcaactggcataatgattgtcttatacataaccctttctccctgttaatcatgaacaaatcattcgccatgattataatatttatccctgatatttgtctggttctttttccttacgaactgtttctgtgatgaatatattctcactgaacaccaggaattctcccaaaacctgtggtaccgcccgttttcccgctgtgatagctacccttaaagactgactcttttttgaactgtctctggaggttgcatgaaagcattgacttatcacggcccacatcacgttcaggtagaaaatgttcccgatccgggcgttgaacaggcagatgatattattctgcgtattacggcaacggcgatctgtggctctgacctccatctttatcgaggcaaaatacctcaggttaaacatggcgatatttttggtcatgaatttatgggggaagtagttgaaaccggaaaggacgtaaaaaatttgcaaaaaggcgaccgagtggtaattccgttcgtcattgcttgtggcgactgttttttctgtcgattgcaacaatatgccgcctgcgaaaataccaatgcgggtaaaggcgctgcgctcaataaaaaacagataccagctccagcggcattgtttggttatagtcacctgtatggcggcgttcctggtgggcaggcggaatatgtccgcgtccctaaagggaatgtggggccgtttaaagtaccgcctttgcttagtgatgataaagcgcttttcctttctgatattctgccaacggcatggcaggcagcaaaaaatgcgcagatccaacaaggtagtagcgttgcagtctatggtgctggtcctgtgggattgttgacaatcgcctgtgcacggttgctcggtgcggaacagatttttgttgttgatcatcatccctaccgcttgcatttcgccgccgaccgctacggcgcgatcccgattaattttgatgaagacagcgatccggcacagagtattattgaacaaacggcaggtcaccggggcgtggatgcagtaatagacgccgtcggttttgaagcgaaaggcagcaccacggaaacggtgctgactaacctgaaactggagggcagcagcggtaaagcgttgcgtcagtgtattgcggcggtcaggcgtggcggcattgttagcgtaccgggcgtctacgctggatttattcacggtttcctgtttggcgacgcctttgataaagggttgagctttaaaatgggacagacccacgttcacgcatggctgggagaattattaccgttaattgagaaaggattactgaaaccagaagaaattgttacccactatatgccgtttgaagaggccgcccggggatatgagattttcgaaaaacgtgaagaggagtgccgtaaggtgattctggtacccggtgcacaaagcgcagaggcggcgcagaaggcggttagtggtctggtgaatgcgatgccggggggaacaatatgatcgtcaggagtggttttcgaggtaaaggacagccatgacgataatcgccgccataatcagaaatcctatcaggatgtaaaatgcttctgccatggttattcccacaaacgaaacggaataattttgcagcaaaagtgaacagtgagaaccaggaaaaattgctgattttgcgtaaagaggatgcgagtgcatcctctgggcaaagcgagttatcgcttgtgcagatgggattaaagcaggtagtcgccagcagcttctggctggtattcgagttccagcacttcaaggtgggttgcaacgccgcccggaagttcccagtgaatggaatcgccaacgcgcagccccagcagtgcggcacctaccggagccataacggaaagctgagtattgctatcggtcatttttgccggatacaccagcgtgcgcacacgcacttcgccatcgctaagattgcggaatttaacccggctgttcattgtcaccacgtcgtgtggcatctcttctgggctacacatttgggcgcgatccaactctgcgtttaacgcgtcggcgattggcaaaccagcataggcgggttgctccagcagaatatcgatgcgttcggcatccaggtcgttaatgatgatagttggtctggacatttttactccatgtcgtcggtgctgcgagtgtcgcagataaacatacccaaaagaaaaccctcaccgtcaggcggcgagggtttaactcacatgatgatactgactgttgctcactctttgaagtgatttgcgtcacattcagggaattcctcaatgcagcgcattatgtataaatcttaatcgccttggtttatggaagacgaattagcgtgttttgtaaatcagatgattaataacccgctttatcaatcacaaaggttttgccacagttacctgggtgaggttgtggcaagaaactgtttgcagaaagcggagcgttgatggcgtcagctttgatgctgatctgaatttcagtcaaatacgcagggttaccctggcacgttagcttaactgctttcacgttctcttttccccagcttttggcaaaggcggcgtcaaagtcacggcggctcactgttttaccgtaattatccgcaaggaattttccggcttcgctctctttaatttcttgattcaggcgtaccatcgtaccgaagtatgcgtccggatcaaaaccaaagcaggcaccgtgtttggcatattcgtagcgttccaggcaggaacgtccgccagctcctggcatgacttcacttagtttagcggccgtttccagacttaatccggtttccgggctactacacattcggctggcgcgcgcttctggtagattcgggattgggcgagtagcgcaaccgaagcgcatccagcggcgttcatcaacaccacgggcagcaacgcttttaggcaatcctggccacagaccatgtacggtcagaaaatcagctttgttggtcgtttcggtttgcaggcgacattcatctcgttcgttacgatttcgatcgtgttgactctggcaaaatccggtttgccaggagagggccaggacatagcgatcaaaatcgccatactgttttgcctgcaacgctaaggcgttggcagaagagaagggaagcagagaaaccgcgagcaacgcggcgttacgccagaatgctttcataatgggtgtggaactcatacatacactgaatactatctattaaatcataaaaaagcccgccaggtgggcttacctggcgggcgtgatgatttattcagcgtttggcgaacgtattagttccacatggcgagaatcggccagccaaccaacagcaacatagagatgtaaatcaccccgaagattgcgccaagacgccagtaatctttacttttcacatagccacagccgtaaataatcaccccaggaccggttgcatacggcgtcagacagcccatgataccgatagacagcaccagcaggatacacagttgttccattggtacgcccggaatacctttaccgacggccagaataaccggcagcatggttgcggtgtgcgcagacaggctggcaaacaggtagtgtgcaaagtagaacaccagaaccagtacaatcaccgttgcgtttggactgaatccttccaggtgcgtactcatggtaccggcgaaccagtcaataaaaccagaacgagtcaggccgttagccatcacaaccagagttgccaggttgaccagtgtgttccatgcgctgttatagcgggtaatgtctttccaaggcacaacgtgcagggccagcattaggctaactgccagcagaccaaccgcagtagcattaatgacttcactgccaaatacccacaaacctaagctgagcaatacaaggccaatcagtgtccactctctgcgtgtcagcgcacccatggttttcagttcatcacccgcccaggttgccacttcttcactgtgtgtgatttccggtttgtacagcacgtaggaaagccacggcgcaatgataagcaagataaccccaaccggcaggaagcagaggaaccactgcaaccagctaatctggataccggcaattttgctgacgaactccagacccagcacgtttggtgccgcaccggtgacaaacatggagctactcagactggtactaatgaccatcatccacatcaaatagccgccaatacgacgcgcggacggatcgttcgggaaacttttaaacaacggcggcaggtttttaatgaccggaaaaaccgtacccccggtacgcgcggtgttggaaggtgtaaacggtgccagcagaatgtcgataatgacaatcgcataacccaacgtcagcgtgcgtttgcccatgaatttcaccaggaaaagggcaatgcgacgacctaacccggaaacttcataccctaatgcaaaaataaatgcgccaaataccagccataccgtggtgctggaaaaaccagccaggccccatttcagcgcctgtttttgcgcattaaacgctgggtcagctaattctttggcatcaaagagcaggtaattactgccaataacgcaaatagtaaccgcaataaaactgatcgctgttgccggaattggctcgaggatcatgccgacaatcattgccacaaacacagcgaagtaatgccatgcctgcggcggcataccgtcggggacagggataagaaacatgacacccatcaccaccagtggggccaatagtttccatatattatcttttgctaaagacatacgggttctccgaaaattaatatttccaaatttatcaagtgcttaaataattaaatctgtgctaaaaaccaggtaaggatcagtaggtcagcactgccgcctggactgagatttcgttcgatacactccctgtcgaactgccggagataatcgagatcggcgggggttcgaatgccccctttttgcaataatgtttgcgcctcgcgctgtagccagcgcaggcccccctcgccaccgcggcttgcaacgttggtatcgccgttgatcgccatcagtaggagcaaggtatcgagcaatgccagttcaggatctaacccctgatccagcagagtgaggtaatgcggcaaggcgtgattgatcaccagtggataacccgcttcggcttcaccgcgtgcgccggtaaggccaagctgttggtacaaccgttgacctgccgtcagttgactattattggtacgcagttcgcgatcggtcaggccacggcagaaacttgccgccgtagaacaaacggttgttggcgttaccggttggttgagttgaagcaaacggccaattgccgcacatagcagccctaaagaaaaaatgctgcctttatgcgtgtttacgcccgcagtggcgcggaacatatcaccttcgcaagccataccaattgggcgtaatccgtggagtaccgcttctggtgccatttccgcactacaggcaccaaattcaatgaaacggggtagccagccctgaatcgccagcgcgctgcggtggaaatcttccagcgccatatctttgtgcgcaccgcagttaatgcgatccacgaggcctggtttcggactcagattgacttcagtcagcatggcgcgccagcccagcagggcgtactcatcgattaaactcgtcgcaagctttgtggttttagtactcgttgcaggcatgctcatcgttcagcagtgcctccatgttatttagttgacgttgcaggcatcgacatcgttcagcagtgcctccatgcggttgagtaaatcggtcagttgatgggtttttccacgcgcgcagacggctgcgctttgttcgcacaacaggcagcggcgaggcggcagactatagtcgcggcgggagagaatttcgccttcgggcgtcaggacatcgatatcccataaccgcccgagaggatgactatgttcaagctcaatggtggcgagcttgaggtcgcgagccggggcggcaatgctcaacatgccctccggcccgctggcggaaaccagtgcagcctgctcctgaatttgccagccctgttttgcggctaaggcacgcaaggctgtcacgccatgattaaaaattcggcgtgtgacctcgctgtctttaatcggcccaggcgcaaccacggtaaaggagaccagtggaacaggatggcgcttgagccagacgtgttgccgtgcttgcctttcatcccggctgacgagcagctcgggaatacttaccgcatggtggctggcgagttcaggaagcaggtgcatggcttattccttcacctgatgcacaacatcgatcacgctgccatcgcggtaacgcacaacggcaacgacgcggtctgtgaattcaatcggctgtggttcaccggtcagcagacgcgcacgttcgcgcagccactcaatggaaaccactttaatgcccgcttcctgcagacgttctgccagttccggacgtgccgggttaactgcgataccgtggtctgtgaccagaatatcgacactggagcctggggtgatgcaggtcagtacgttatccaccagagtcggaatacgaccgcgtaccagcggcgcgacgatgatggaaagcgcagaggcaatcgcggtatcgcagtgaccaccggaagcaccacgcagtacgccgtcagagccggtcagcacgttaacgttgaactgggtgtcaatttccagcgcgctcagtaccaccacgtcgagacgatcaacgcttgcgcctttgctaccccagttagcgtactggttggcgctgatttcgatgtgattggggttacgggccaggctttgcgcagcatggctgtcaaagctctgcacatccagcagtttgcggatcagacctttttcgtgcaggtcaaccatcgtcgcggtaataccgccaagggcgaagtcggcgcgaatatcgcggctacgcattttgtcttccaggaaacgggttaccgccaggcttgcgccgccggtgccggtttgcatggagaaaccttctttgaagtagccagagttgacaatcacatccgcagcgctacgggcaataagcagttcgcgcgggttagtggtcatacgggtcgcgccagcgccgatttttgcagcatcgccaacgcggtcaactttgacgatcaaatcaacctgatcttgctcaatgcttgccggattatgcggataaggcagcagttcttcggtaagcatcacgacctgttttgcgttgtcggcatcaactattgcatagccgagggagccgcagcaggctttaccggtgtagccgttggcattaccgaattcatcacaggacgggacgccgaggaaagccacgtcgatattcagttcgccgctctgtaccagatgcacacgaccgccgtgagagtggatctgcaccggttctgccagcagaccacgggagatctcttccgccagtggaccacgcaggccggaggtataaatgcgggtaaccacgccctggcgaatgtgttctaccagcggcgcatggcaatcactcagggagctggacgccagggtcaggtttttaaagcccatcttcgcgatgacgtccatcaccatattgacggtcaggtcaccgccacggaaagcgtgatggaaggaaaccgtcatgccgtcctgtaaaccagagcgacgaatcgcttcttccaggttggcgcacagtttgcgatcgcgcgctttttcagcctggtaggtttgctttgggctgttctggaaagcggcaagatcgcattcagcgcgacgattccaggccgctacccgttcttgtcgttgagattgttcaattttctgcgtcattttgattgccttattcttcgcggatgccggaaagttctgcacgggagagcaccagacgggcgcgatcgataaccggaccgtccaccatcttgccgttcagggaaaccacgccgaggccttcgcgagcggcggcttcagcggcttctacgacgcggcgggcgtgatccacttctttctgggtcggtgcgtagaggttgtgcagcagatcaatctgacgcgggttgatcaggcttttgccgtcaaagcccagctgtttgatgtgggcggcttcttgcagaaatccggcttcgttgttagcgtcggaatagacggtatcgaacgcctgaatacccgcagagcgcgcggcctgcaaaatggaacagcgtgcgaacagcagttcagttccttccggggagcgttctgtacgcaggttgcgcacatagtcttctgcaccgagggcgataccgatcaaacgctcggaagcgtgagcgatttccactgcgcgggtaatccccagcggagattcaatcgccgccagcaggccggtgctgccgggttcacgaccacaggctttttcgatacgcaggatctctttttcaatatccagaacatcctgagcggtatcggttttcggcagacgcacaacgtccgcaccaccgcgaacgacggcttccaggtcgttaacaccccattcggaatccagcgcgttgacacgcacaatggtttcaatatcgcgatacagcggatgttgcagcgcgtggtaaaccatgcggcgggcggtgtctttttcacgcaatgctacggagtcttcgaggtcaaacatcagggcatcagccgggtagatgaaggagttgctgaccatcgcggcattggcaccaggcacaaacaacatgctgcggcgggtgcgagttttacgttgttgcaggctagcggaaatcattggcaatcctcccatggcagagccgggataccgctggcgcgtgccagcagggcttccagtcgtgcacgtaaaatgcagtacagtgcgcctttgtcatcgacattcagctgtacgccgcgcacgttgtagcgggcgagaacgtccagaatggtggtgcgaattgcatcgccaaactgtttctcaacgctgctattgatttgcaggtcgatatcctgcgtatcgagtggggcgatgcgtatcatcacatccccagactcaagggtgcctgcaacggcgggctggtttattttcatttttcacctgtttctcatgcgggggtcttttgacgagctgccgcgtcctggcgggagtgctcaagcaggttctgcaaataatgcagcgtgactgcagggaccagcggcgcgatagccgtgagatcgtttttcgccagcagttgacgtacccgggaagcggatatcggcatctcctggtaacgcagccgctcaatttcaaccagttcgatgggcggtgcggagatagtcggcgtttccagccagtagcgcatatcctggttgtactgggcggtaacgcgacaaaagggttcagtaccgacaaagcggtgagttacacccagcgcgggagcgaggtactgacggaaaatcttcagatcaatttcggtgtaacaatggttaatgacgctctgttctttaatgaagtagcaagggaacgtagcgcgggagatgatgtattcggagccacgatgcacagtcaggcgtggaatatcggcggtgccttttaacaccaaatccagccggtcttcataggggaagcgactagaatcttctttgactaaaaacagatgcaaccagtcgcactgtgccgcagcctgttgaatcagataacggtgaccattcgtaaagggattggcgttcatcacaatgcagccaatcttgttccctggatgacgaaattttttcaggctttcggcatagcgtttcagtcgcgtggcgctgttttccatcagcaccatcacgccgggtacgctggtcagcgtggaaaaaccgcactggcggaacagcgcctcgtattcggttttggtataaataaacagatgcgtgctgtgccgctcataggcgaggtttatcaattcagtggctaatgtcagcgccagtccttcaccgcggacggattcactgatagcaacgcatttaataatatttccggcaattccaccgcacgcgataagcttttcatcgcgggttacggtaataaatacttcgactgtggtgtcaacgctcaaatcattttcatgcaggaattgggcgatttccgccatttttttattttcactacgttttacgcgggtgaaaatatcattgccgaacataataaatagtatcctgaaggtgcatgttgttatcgatttgcaacgaatgttgttcaatgttgcaaactgataaccttttattttcacttgggagaaagggggtgatcgaggtatatctttttctcctttcgctatacatcctaaggagtatttcggcgtgaaattttgatttatttcacatagagttagtggttttttatttatttaatgattttaagttttttaattaatgtaattacgaaatgactcgcaggtttaagtgatttaattgatttaatgaataaaatttgccacgatcataattaatatctatgtattttgattcaacattttaattacatccgtcaaagaggctcgggacaacccgcaaggaaaacaatgttgcagcttaacgagaataaacagtttgcatttttccaaagactggcatttccgctgcgtatctttttgctgattctggtgttcagtatatttgtcattgcagccctggcgcaatattttacggccagttttgaggactatttaacgcttcatgtacgcgacatggcaatgaatcaggcgaaaattattgcctccaatgacagtgtcatctctgcggtgaaaacgcgtgactacaaacggctggcgaccatcgctaacaaattacaaagagataccgattttgattatgtggtgattggggaccggcacagcatccgcctttaccatcctaatccggagaaaattggttatcctatgcagttcaccaaacagggcgcgctggagaaaggggagagctacttcattaccgggaaagggagtatggggatggcgatgcgcgccaaaacgccaatctttgatgacgatggaaaagtcatcggcgtggtgagcattggctacctggtgagtaaaatcgatagctggcgggctgagtttttattaccgatggcaggtgtgtttgtcgtgctgttagggattctgatgttgctgagctggttcctggccgcgcatatccgtcggcagatgatgggcatggagccaaagcaaatcgcacgcgtggtccgtcagcaagaggcgctgtttagtagcgtttatgaagggctgattgcggtggatccgcatggttacattaccgccatcaatcgtaacgcaagaaagatgctggggctgagttcccccggacggcaatggttgggtaaacccattgttgaagtggtcaggcccgccgatttctttaccgaacagattgatgaaaaacgtcaggatgtggtggcgaactttaacggtctgagcgttattgccaaccgggaagctattcgtagtggtgatgatttgctgggggccattatcagctttcgtagtaaagacgaaatttccaccctcaatgcgcaactgacgcaaataaaacaatacgttgagagccttcgtacattgcgacacgagcatctcaattggatgagcacgctcaatggtctgttgcagatgaaagagtatgatcgcgtgctggcgatggtgcagggggagtctcaggcccagcaacagcttattgacagcctgcgcgaggcgtttgccgatcgccaggtggcggggctgctttttggtaaagtgcagcgcgcccgggaactggggctaaaaatgatcattgtccccggtagccagcttagccaactgccgccaggactggatagcaccgagtttgcagccattgtgggcaatttacttgataacgccttcgaagccagcctgcgtagcgatgaaggaaacaagatcgttgaattattcctcagcgatgaaggcgatgatgtggtgattgaagtcgccgatcagggctgcggcgttccagagtctctacgagacaaaatatttgagcagggggtcagtacgcgtgctgacgagcccggtgaacatggcattgggttgtacttgattgccagctacgtaacgcgctgcggtggtgttatcactctcgaagataatgatccctgcggtaccttatttagtatctatattccgaaagtgaaacctaatgacagctccattaaccctattgatcgttgaggacgaaacgccgctggcagagatgcatgcggaatatattcgtcacattcccggattcagtcagatattactggcgggaaatctggcgcaggcccgaatgatgatcgagcgttttaagccggggctaatcttgctcgataactatcttcctgacggtagagggattaatttactgcatgaactggtgcaggcgcattatcccggcgacgtggtgtttaccactgcagccagcgatatggaaacggtgtctgaagccgtacgttgtggtgtatttgattatctcattaagcccattgcctatgaacggctggggcaaacgctaacccgtttccgccagcgtaaacatatgctggaaagtattgatagcgccagccagaagcaaattgatgagatgtttaatgcttatgctcgcggtgaacctaaggacgagctaccgaccggcattgaccccttgacgctaaacgcggtgcgaaaactgtttaaagagcctggtgtgcaacatacggcagaaacggtggcgcaggcactgaccatcagccgcaccactgccaggcgttatcttgaatattgcgccagccgccatctgattattgctgaaattgttcacggcaaagttggcagaccacaacgcatataccacagtgggtgacatgataaagccggaggaaacttgcctccggcattactatttacttgcctgtgaccgctgctgccgttcctggcaccatcagctctgtagcaacgataacaatcaccaaaccaacaagcaccggtacgctggtgcgttttacgacttcaaacgggctgatcttcgccatcccggcaaccgcaacgactacgccagaaacggggctaagggtacggccaaggttactcgcctgcagcatcgggatagtcaaatacgccgggttaatgccggaagagtgcgccagtttcgggatcatctcaacaaacgcataaaacggcgcattgccactaccggtcgtgactgccgccagcattgtcagaatcaccaataccagcatcaggatgatactcgcgctaccaaagctggtagcgatagaaatcagactttgaataaagccgatggtgctaagcccctgagcgaataccccagcggcaaccagcagcatcaccacgttagcaaacgcatctgccatcccgcgataagccacttccagaccagagaaaactttctgggtattaaagctgcggaggaactccagaatggaggcaatcagcatacaaatcaccagaatagtgatgatgtgtaattgcggaccccatttaccgtcaaaaatcagtacaccgatgatcggcgtgaacggcaaaatggcataaaacgcaggagcagtggtggtgatttcactgacatctaacatttcatgagagatgtgctcttttttatccagataacgttgccagaagaagtgggcgatcgccatgccgataattgcagcaatactgataggcagcgtcgttttgaaggcgaagtcaatcaggctcatttcggaagcttgcgccgccagcaccacatccccactagtcggtgcgagaataatcgccgccggggaggcacaaatggcagcagctgcgccacgactgataccaacgtttaccatcaccggaaatagggttgccatcagcaaaacacccagaccggttgcggaagagacggccagagacatcagacaggcgacaaaataggcggcaatcatcagcaggtaaggggagttaatatactgcaatggtttactcgccagcttgaccaccatatcattcgcgccgatatgggtcatgtaagcggcaaatccacacagcatcataatcatcatgccgaggtcgccgccgcggctcattagtaatattttaacgtattcaacgatatccgtggcgctgtagcctgtactagcctggctggacggtaacactttgtgccccataatggcactgataatcagcaataacaggccaccgacaaataacacaccagtggcggaataccctttaatgatgtagcgagctacacccacaataaccacaaccccaataaggagctcaatgaatgtcagcataatttttcctgtctccaggccccaaagtaaataataaaaaattcctaaagcttaaggaaaaaatatgcccaataaattggcgatgaatgctgattaaaatcaagaaaaactgccattaagacattgaagttgctgtttttatacatagataacaaaacgcatatttagcggttggcaattatcacataataatgtgtgcaaattgatggtggattgatgcaaatttgttaattgcaatggtgttagctgcggctgtgcgctcaaaaaataatctaatatgagcataggttgacgatatatattatatacttcgttaagatgattgttgtatctcgttaaaaaataaaataatttttccttgattgcattttgtcatcaaaaaagacttggtttttcttttttgactattcccatcgcagaaaacgacgcatcatctttaatcgatgcgcggaaatatttaacttgaacaagcggaaataaatagagcagctattcagattattctttatgttgggtctattaaggttatgttaattgtagctttgctatgctagtagtagatttttgataaatgttttatggtcacaaatgaacgtgagtaaatatgtcgctatcttttcctttgtttttattcagttaatcagcgttggtaaagtttttgctaacgcagatgagtggatgacaacgtttagagaaaatattgcacaaacctggcaacagcctgaacattatgatttatatattcctgccatcacctggcatgcacgtttcgcttacgacaaagaaaaaaccgatcgctataacgagcgaccgtggggtggcggttttggcctgagccgttgggatgaaaaaggaaactggcatggcctgtatgccatggcatttaaggacagctggaacaaatgggaaccgattgccggatacggatgggaaagtacctggcgaccgctggcggatgaaaattttcatttaggtctgggattcaccgctggcgtaacggcacgcgataactggaattacatccctctcccggttctactgccattggcctccgtgggttatggcccagtgacttttcagatgacctacattccgggtacctacaacaatggcaatgtgtactttgcctggatgcgctttcagttttgagacaaatgaagttttagtaacttctttaaaatcaatagctaaaataagtaacatcaaaaataacgcgacttttatcactttttagtaaagttacactggacaaagcgtaccacaattggtgtactggtaaccgacacagcatttgtgtctatttttcatgtaaaggtaattttgatgtctaagattaaaggtaacgttaagtggtttaatgagtccaaaggattcggtttcattactccggaagacggcagcaaagacgtgttcgtacacttctctgcaatccagactaatggttttaaaactcttgctgaaggtcagcgcgtagagttcgaaatcactaacggtgccaaaggcccttctgctgcaaacgtaatcgctctgtaagatacgtcagcaagaattcaaaacccgcttaatcagcgggttttttttggtctttagtgtgcggtactggcgctaaacagccagaatgccagtgcggtcatggcaaaagaccccagaaggttgacgaaaacgttcagtaatgcccagccaaagcggccctcttgtaacaaaaacaccacttctgcgctaaatgtactgaaggttgttagaccgccacaaaatccggtggtgattaatactttccacactggatcaatgttcgtcatcctgctgaaccatgcgaatcctattcctatgatgaatgccccaatcaggtttgctgtcagcgtccccaacggaatcgcctgatgcagtgggttaaatcgcatacttaacagccatctcgccacgcttcccgtaccaccgccaataaaaactgctaaaagaagttgtaacactgcaaaatcctgctatttgatttgtatgagtgataagtgtaacgccgaataatcgtcgttggcgaattttacgactctgacaggaggtggcaatgctggttgccgcaggacagtttgctgttacatctgtgtgggaaaagaacgctgagatttgtgccagcttgatggcgcaggcggcggaaaacgacgcaagcctgtttgccctgccggaagcattgctggcgcgcgatgatcatgatgcagatctaagcgttaaaagtgcacagctgctggaaggcgaattcctcggactttacggcgagaaagtaaacgtaacatgatgacgacaattctgacgattcatgttcctagtacgccggggcgcgcatggaatatgctggtggcacttcaggcaggaaacatcgtcgcccgttatgccaaactgcatctctatgatgcatttgccattcaggaaagtcgccgtgttgatgctggtaatgaaatcgctccgttactggaggtggaagggatgaaggtcggtctgatgacctgttatgacttacgctttccagagctggcgctggcacaggcattacagggagctgaaatcctggtacttcctgccgcctgggttcgcgggccgctcaaagagcatcactggagtacgttgcttgccgctcgtgcgctggataccacctgttatatggtggcggcgggggagtgcgggaacaaaaatatcggtcaaagccggattatagatccctttggcgtcaccattgcggcagcgagtgaaatgcctgcactcattatggcggaagtgacgcccgaacgtgtgcgtcaggtgcgcgcgcaactgcccgtcttaaacaaccgtcgctttgcgccgccgcaattattatgatgtttttttactcggcgcttgattcaccttgttacagattgctattgtgtgcgcgcgtcgaatgaccgttaatattctctggtttttaaggcgcgttctgttgccggttatatgtcaagaaggtatctatgggtgagattagtattaccaaactgctggtagttgcggcgctggtcgttctgctgtttgggactaagaagttacgtacgctgggcggagaccttggagcggccattaaagggttcaagaaggcgatgaatgatgacgatgctgcggcgaaaaaaggcgcagacgttgatcttcaggctgaaaagctctctcataaagagtgacgtggcgagcaggacgctccctcaatatcttgttcgatacaaaaaacccgcttcaaaaagcgggttttttatcagacagatgtaagtaattattacaggattacttaacttccatccctttcgcctgcaaatcggcgtggtaagaagagcggacaaacggaccgcatgcagcatgggtaaagcccatcgccagcgcttcggctttcatttcgtcgaactcatccgggctaacgtaacgttgaaccggcaggtgatggcggcttggctgcaaatattgccccagcgttaacatcgtcacaccatgacggcgcaggtcgcgcattacctcaataatttcttcattggtttcacccagtcccaccatcagaccagacttggtcgggatttccggatgcgcttctttaaagcgttccagcagcttcaggctccagttgtaatctgcaccaggccgtacctgacggtaaatacgcggtacgttttccaggttatggttgaacacatctggtggcgttgcagtcagaatatccagagcacgatccatacgaccgcggaaatccggcaccagagtttcaattttgatttgcgggcttttttcccgaatggcagtaatgcaatccgcaaagtgctgggcaccgccatcgcgcaggtcatcacggtcaacggaggtgataaccacataacgcagcgccatatcggcaatggtctgcgccagtttcactggttcattggcatcaggagctaccgggcgaccgtgggcaacatcacagaacggacaacggcgggtacaaatagcgccgaggatcataaacgttgctgtgccgtggttgaagcattccgccaggttagggcaggaggcttcctcgcagacagaatgcaggccatttttgcgcattgcggctttgatgccctggatacgtgtagagtccgctggaagcttgattttcatccattccggcttgcgcagcagggcttcgcgctctgttgccacgtttttaaccgggataagggccatcttatcggcatcgcggtatttaacaccgcgttccatcacaatgggtttactcatagcgtgcgtgttccagttgcgaattacgaaggaaagcgtttcaattcaatagattgttgtaattatcaactatttttgaattaacgactggcagtatatcattgaaacggacctgaaagcagccaaagcggtcgcgaaaatgtaaaattgttgttggattgtgccattttatcgttctgcgctgtgatctggctgtaacaatactttttcaaaatgcattacggataacatctattactccgtgcaggatgggatcacgcaggctgaatttgttgtagtggatagagaaatctatttgctcctcatttaaggacggaaaaggcagtttttccagcggccagcagcggctaaacaggttataaaaacggctgggaataatcgctaacatgtcactgttggcaaccagtgcagcgattgtcaaaatgttgtagctggtgaaattgatttgccggtccggaaacatttcttgaactctctgccgcagaccgctgaaattttgctcttccggtaacagaagtacatgcgcagcgttgtcgatagtctctctgtcatcttctaaagagagtagtggatttccctcgcggcaaattaacaccatattgtcggtgaacagaacatgatgttgcaccgtacgattggtgcaaaacatgttatcgatgatgagatcggtttgaaactgactgagttggttttccgcgtcgctgatgggcgggttgcgcagtaaaagctgcggatagtgagttttaatcgcccgatagatgacaggaaggaccagtgctccgacgctgggagtggtcgcaatagttatcgttcgttgcttatcatagcttccttcgatatccagcgcgccaagaatggactcaaggccctgactgatatactcatgtagatgcatcgcaaatgcggtaggagtgacaccctggcctttgcgaataaacaatgggtcagggaatataacgcgcagtttctgaatagactgactgattgcgctgggggtcagattaagcactttcgctgcattaacgatccctttatgtacatatacagcttcaaaaatagtcagaaggttaagatcaatatttcgtaaggttgtaaatatttgtggtttaccttcactgctctttctgcttaaacagggttcaatttgattattactatccacgcacttactccaattttattcatggaaaaataatatttaaaaaattacaataatcttatgtctaattggaacggaacgcttttgctcaccataatcaactatttcaataggttaatcaatggggtgagttacggagcaaggcgtggcaccgcatttctgcaagtgataaagaaaatatacaaacgcgaaggagatgtaaagcattagcagatattatgagtaatgacccagtgtaaattgggccattgatgtatggaattaagcggtaatatattcgaagtccggattgtttagtagcgctaaaatattttccagtaaacgtggagcaatattattagtcgtcgcttcgggtttccattgacttattttagccatttccattccggcatacccacaaggattaatacgtaaaaatggactaagatccatattgacgtttaatgccagaccgtggaaactacaaccgcgtcgaatacgtaaacccagactgcaaattttcttttccccaacatagacacctggcgcgtcagcccgaggatgcgcttctatacccagttcagccagggtattcaccactgtttgctcaagcaaggtcaccagttcacgcacaccgagtttacggcgtttcaggttaagcaacacatacatcacctgttgccccggcccgtgataagtcacctgcccaccgcgatcgctctggatcaccggaatatcacccggcattaaaatgtgctccgcttttcctgcctgaccttgggtgaataccggatagtgctcgaccagccagatttcatcaagggtactatcatcgcgggtatcggtgaattcatgcatagcctgggagattggctcgtaaggctgaagaccgagctggcggacaagaattttatcctgatacaaaacggcatctccgtggagaatgagtaaaagtgggggaaaagtatatcacagcgaggagaggggagttacccgaccaggagccgggtaacggagaagcgagttacagaaccatgcggacaatatcgattttgcccagttcttcatacagtgtttcaacctgctcgatatgagtggcgttgatagtgatagatacgctgtggtagttgcctttgctgcttggttttaccgttggggtgtagtcacctggcgcatggcgctgtaccacttcaaccacctgatcaaccagctcaggtaacgcctgccccataactttgtaagtaaaaggagtagggaattcaagcagttcgttaagtttggttttcatgtcagctccggcgtaacgtaattaaatagcaactcccgccagaaggcgggagttttttactgatgcttagtatatggggacggaaattacactttcaagtgtttaatttttaaccaaaccagtgatggaacattaatttaatgtaatcaatgattttgccgaagaagttaccttccgggatttcttgcaacacaaccagcgggcgttgctcgatcgttttgccatcaagctggaagttgatagttccgacgacctgattcttttgcagcggcgcatgcaattcactgctgttcagcacatagctggctttcagatctttcatgcgaccacgcggaatggtcaggtacacgtctttatcaacccctaagctagcgcgatcagaatcaccaaaccaaaccggttcagaggcgaactctttacctactttcagtgggttaacggtttcaaagaaacggaagccccaggttagcagttttttactttcggcttcacggcctttaaaagtacgtccgcccattaccgcagaaatcaagcgcatctggccttcagtcgcagaagcaacaaggttgtaacctgctttgtcagtgtgtccggttttgatgccgtcgacattcaggctgttatcccataacaggccgttacggttcagctggcgaataccgttaaacgtaaattctttttctttatagatgctgtattcattcggtacgtcacggatcaatgcctggccgatcagcgccatatctcgcgcggagctgtactgaccatcagcatccagaccatgtaccgtctggaagtgggtatttttcaggcccagtgcgttaacgtagctgttcatcaagccaacaaaagcgtcctggctaccagcggcaaaatcggccatggcgacacaagcatcgttaccgctttgcaggttaataccgcggatcagctgagaaaccggaacctgcatgcccggtttgaggaacatcaggctagaacctttaaacaccgggttaccggtggcccatgcgtcgttgccgatagtgactaaatcagtttctttaaatttaccggctttcattgcctggccgataacgtaactggtcatcattttggtcaggctggcaggatcgcggcggacatctgcgttctgttcggcgagcactttgccggagttatagtcaatcaggatgtaggactccgcatcgatctgcggtacacccgggatcatagttttgatattcaggtcatcggcatgtgcagcagagataaaggctgtgcaaagagccgtggtgagcgccaggcgcttcatgatacgagcggaaaaaatggtattcatggtctgaactacgacatccgtgatggaattaaaaaagtgccctactatagcaaatgcactaccggcaggcatctgactttccgcgtgactttgttaacgtcatttacagaaattgacacatcagatgcctgctttacgttactgcgcggtagtaataaaactctgtaattgggcttcggtttgcaaacgttgctgcaaggtactggcttcggctttgctggcgaatgggccaagctggatccgccagaccgcgccattttgagttacgcgaccggggacgccgaacttctgtcccagttgctgttggtactgttgcgcacgagcctgatcgcttacggccccgacttgcaccataaagttgccgctggcgctttggctgacggcttgcggtgtcaccattgcagggctggttgcaggcgttgtgctcggagctgtaacaacgggctgtggcgcaggcgtcggttcgctgccttccagtacaccaggcgctaaggtcgttggtgcgccgaggaaaccgctactggttaccggcgcgccggtcggatcttcgctttttagcgtgctattactgaccggaagaatgtcaccctgcgggccagacacactacttgttcccgcgccaccgcttaaatcgggaggtgcaggcagggcgtaagtctgtttggcgactgtggtacaagccataccaggaccagaaaggctaccatcctgggcaacaataatcggatcgatacgaactttggtgttgttactcgtgttaagacggtcagctgccgcgcgagaaagactaataacgcggtcgttgccgtaagggccgcgatcattaatgcgcaccacgatcattcgcccgttagccaggttagtgattctggcgtagctggggatcggaagcgttggatgggctgccgtcagctgtgtcggatcgaatgcttcgccagaggccgtcaggttactgccgggttcggcatcatagattgccgccagtcccgcctggctaaatcgagacggatcctgcacgattttgtagcttttaccgtcgcgctggtaatcctgatttgccgtcgcgttcagtggttcgaaacgcgggtccgccccgctaatttcaactatagggccgttacataccgcaggctgcggtacacttaccgtctgttgctgaccatcatcgcttgtacatgccgcgagcattcctgccgcgatgcagatcccgagccactgcttacgcattgcgcacctcttacacgcttttgctcaacattttcctgtgggtgtggatactcattacaatcccgaacccagccatcagcacaattagcgcgcttcctccataactgaccagtgggagcggaacccctacaaccggcagaataccgcttaccataccaatatttacgaagacataaacgaataatatcagcattaagccgccagccatgacgcgaccaaaggtggtttgcgctctggcggctatccacagcccgcgcatgatcagcagaatgtagagagcgagcagaatcagaatgcccactaatcccagctcttccgccagtaccgcgaagataaagtcagtatggcgttcggggagaaattcaagctgactctgagtgccgtgcagccagcctttgccgcgtaatccgccggagccaatagcaattttagactgaataatgtgatagcccgcgccgagtgggtcactttccgggtccaggagcatcattacgcgctggcgctggtaatcatgcatcaggaagaaccacagaatcggaatgaacgccgctaccagcactactgcgacgccaatcagacgccagctaaggccagagaggaacagtacaaacagaccggaaagcgcaacgaggatacttgttcccaggtcaggctgtgcagccaccagcagcgtgggcataaatatcagcaccagcgcgatgccagtgttcttcaagcttggcgggcaaacgtcgcggttgataaagcgcgcaaccatcagtggtacggctattttggcaatttcgctcggctgaaaacgaacaataccgaggtccagccagcgttgagcacctttagagatggcaccgaaagcatctaccgccaccagcaaaataatacagatgatatagagatagggggcccagccttcataaacgcgtggaggaatttgcgccatcaccaccatgatgaccagacccatcgcgatttggccgattttacgctccatcatgccaatatcctgaccgctggcgctccagataaccagggcgctgtaaaccagcaatgccagtaagatcagcagcattgtgggatcgagatggactttatcccagaatgtttttttattcggattatccgtcatgattaatggtcctccgctgcggcaaccgctggattttccgcaggcagatcggtgttgttatcacccagcataatgtggtcgaggatctggcgcatcagtgtaccaaccgccggacccgcaccaccgttctccagaatcatggcgacagccacttgcggattgttgtatggcgcaaaggcggtcatcagtttgtggtcacgtaaacgctcggcaattttgtgcgcattataggtttcgttcgctttcagaccgaagacctgagcggtaccggatttcgccgcaattttgtacggtgcgctagcaaagtatttatgcgccgtaccgttagggcggttagcaacaccgtacataccgtctttcgccagctcccagtaaccggaatgaatatcgccgacgggcggttcatgcggctgtacccatggcacctgtttgccgtcttcggcggtgctcatcagcaaatgaggaaccttcacgataccgtcattaatcaggatcatcagtgccttactcatctggattggggtcgctgtccagtaaccctgaccgataccaaccggaatggtgtcaccctgataccacggttttttaaagcgtttctgtttccattcgcgggtaggcatgttgccggaacgttcttccgccaggtcgataccggtgtaatgaccataaccgaatttacccatccattcggagaggcgatcgatccccatatcgtaggccacctgatagaagaaggtatccgcagattcttccaggcttcttgtgacattcagacgcccgtggccccattttttccagtcacgataacgtttttcgctacctggcagttgccaccagcctgggtcaaacagcgtcgtattgcgcgtgatcaccccggcgctcaatgcgctaaccgccacatagggtttaactgtagacgcgggaggataaaccccctgtgtggcgcggttcaccagcggtgtattcggatcgttcaacaaggcggaataatctttgctggagataccgtcaacaaacaagtttgggtcataactaggcgtggaaaccagcgccagcaccccacctgtacgcggatcggtgactaccacagctgcgcggctacccgccagcagcgtttcaatatattgctggagtttgagatccagcgtcaggtaaatatcgtgtccggcttgcggtggtacttcttttaactggcgaataacacgcccacggttgttaacttcaacctcttcataaccggtctgaccgtgcagcacatcttcatagtaacgctcaatgcccagcttaccgatatcatgcgttgccgcatagttggccagtttgccgtcattattcaggcgttcgacgtctttatcgttgattttgctcacatagccgatgacgtgggtcaacgcgctaccgtaaggatagtaacgacgtttatagcctttaacttcgacacccggaaaacggtactgattgacggcaaagcgagctacttgtacttcggtcaggttagttttcaccggaatagaggtgaaacggtgactacgtgcgcgctcttttcggaatgcagcaatatcgtcatcggtcagatctaccacgctgcgcaaagcgtccagcgtttgctgcacgttatcgactttctccggcatcatttctatctggtagatagtgcggttgagggccagagggataccgttacgatcgtagataatgccgcggctgggcgcgataggcaccagcttaatgcggttttcattagagcgggtctggtagtcggtaaagcgaacaatttgcagattatacaggttggcgataagcacgccggtcagcagcaaaatccccaaaaaggcgaccagcgcccggcgcacaaacagcgcggactctgccgtatagtcgcgaaaagagttctgtagtttcatccgctgcgttttctactcaaagctcccttatcactcacggtgataaggatggttggtggtgatgctccacgcccggtacagactctctgcgaccagcacgcgaaccagcggatgggggagggtaagcgcgctcaggctccagctctgctcagccgccgctttacaggcagggctcaacccttcaggcccgccaatcagtagactgacgtcgcgaccatccagcttccagcgttccagctcagcggctaactgcggcgtatcccagggcttgcctggaatatcgagggtgacaatgcggtttttgcctgcggccgccaacatctgctcaccctctttgtcgagtatgcgcttgatgtccgcattcttgccgcgttttccggccggaatttcaatcagctcgaagggcatatctttcggaaaacgacgcaggtactcggtaaaaccggtttgtacccagtccggcattttcgttcccacggcgacaagttgcagcttcacgcattaactccagagtttttccagttcatacaggcgacggctctcttcctgcatgacatggacaatcacatcgcccaaatccacgacaatccagtcggcgctgttttcaccttctacgccgagcggtaacaggcccgctgcgcgagactcctgcacaacgtggtcagcaatggacataacatgacggctggacgtacccgtacagatgatcatgcagtcggtgatgctggatttgccctgaacgtctaaggcgatgatgtcctgacctttgaggtcatcaattttgtcgataacaaaatcctggagtgctttaccctgcaagttttccccctgggtgaatcaaatagataaaaatggtctgtcagtatacctgaaccagaggcgatttcgggacaattgtcgccgaatcggctttcgaaagtgggctatcatcccaccccgcgccgcagattgcatcgccatttttgtaaaacaatttctacaaagtcgtgtctggcggaaaaagtctggctgcggagaatatcagcctgcccgggtctgtcaatggtcgttgcggcttacccgtaaaaaaacagaaaagtcatgcattctcgaccccgatggcacggctattgaggacgcgtagcgtcgcgaatttttggttgatatcaatggcgctccaacacccctggtcaacgcgaaaatgccacatagcttcggcaggcatgccaattaaacgggcgattaacagactcagtacaccctgatggctgacgactaaaatattctgatagtgctgaaattcactaagccttgcgataaagcgttccacacgttggctaaatgcctgaaatccttcaccgttcgtggggattgcatgctgccagtcattgcaccacgcgctatagttttcggcatcttcttgcatgaggtcgcgatgatgtcgcatctcccagtcgccaaaaaacatttcgttgagttcaggtatgatttgcacggggagctggcggtcactgagaaccagtcgcgcggtatgctgtgcccgttccagttcactgcataaaaccagatcaaaggaaacaccatgtagcagcgtatgcagattttgcgcttgctcaataccgcgcgcggtcaggggggtgggcgcatgaccgctgtaaagaccatcgatattcgcttgcgtttcaccatgacgaattaaccacagtcgcatcatgccctccgtaacgacaggtatcagcgatacaagccttgttggttaatgtaagtcagtaccggttccggcaataaatcctcacaactttcaccgttttgcaaacgttcgcggatgatggtcgcgctgatgttaaaccacggcgtttcagccagataaattttaccggcaggctgaaggtgaagatcttccgggttatgtgtcaaatgatcttccagccattgctggtattgcggttgcgccatttcaagtgggtaacctggacgccgacagacgatcaaatgtgcattgtcgagtatcgtttcgtattcgtaccaggtcggaaaggtcagcagactatcctgaccaataataaacgccagcggcacgtccggtccttgttcctgccgccactctttcagtgtttgcgcagtgtaagagggggcattgcgctttagctcgcgttcatcaagagtaaataatggcttgtcggcaatcgccagttcaagcatgtgtttacgctgcacgctgttcgcttccggctggggacgatgcggaggaacattattagggatgattgtgacccgcgtcagaccaatcaaattcgccagcgtttccacgggttttagatgaccatagtgcaccggatcaaaggtgccgccaaacagagcctgtaaagatttcatatcaaccgtcgataaatacgtccgccaggggtttatggcacaacagaagagataacccttccagctctgcccacacactctgaccgtaatcttgtttgagggtgagttccgttcgtgtcaggagttgcacggcctgacgtaactgcgtctgacttaagcgatttaacgcctcgcccatcatgccccggcggttctgccatacccgatgcttatcaaacaacgcacgcagtggcgtatgggcagactggcgtttcaggttaaccagtaacaacagttcacgttgtaatgtgcgcaacaaaataaccggttcgctgccttccagacgcagttgctgaagaatatgcaatgcgcgcttactttttcccatcaacaaagcatcaacccaatgaaaaggggtgaaatgcgcggcatcattcaccgcctgttcaacgcgcggtaatgtcaatttgccgtctggccagagcaggcttaaacgctccagtgcctgagccagcgccagcaggttaccttcataacagtagcagagcacctgatttgccgcgtcatccagttctaagttgagctgttttgcgcgcgcagcaacccagcggggaagctgagcctgctccggtgtctgacaggtcacctgcacgctgcgattcgcaagcgcagtaaaccaggcggcattttcttgcgctttgcttaatttattaccgcggacgatcaacagcaggtcgtcatgcagaagtccggtgagtgtgagaagttgctcattgatcgccgcattcggtccgttttctggtaacaacagcaatagcgtttgtcgactggcaaacagactcatagcctggcataagctaaagatcgcattccagtcagtgttgggatcaatggaaaaagtgtggtgttcttcgaatccttgtgccgcagctacctgacgaacagcgtcctggctttcctgcaataacagaggatcgttaccaagtaaaagatacgccgcgcgcagcccttcattgagctgcgcgcggagttgttccgggtacaaccgaatcatcagttacccagcgtggtggagacgcgtgcaggcgttgccggagtatccgttgtggtgctcgtctgttcttcgtcggaacgaatatccgcagcacggatgcttggcagcttacgaatcagctgttcggcagcacggtcgtacatctcttttacgatcatgtcttgttcgttatctttcgctaacgccatttgcgggttatcgaagaagctacggaagactttggcgctaatcgggtagatatcacggccggggatcaacacggtcgcattaaccgtcatgatcatctgatactctgctgtttgaccgttacggaatacgcttgcggtatctttcgcgatgctcactttacccaaacgcaaggatggaacgtccttacgcgtggtttctttatcaagcaactcgacaccattcagacgtaactggttacgcaccgcacggcttaatggcccgttcggatcgccactgtccaggatcatgaccttcatagtggaaggaacctgcgtggtatcacgcagatgccagccacacccggcggtgattaacaccgccagagataacaacaatgttgccagatatcgcacgcttcctcccgcgcttagccaacgaccagattgaggagtttacctggtacgtaaatcactttacgtacagtaacgccatcaagatattttgctaccagatgttcctggccagcacgttcgcgaacctgttcttccgttgcgtccaccggaacggtgattttggcacggactttaccgttaacctgcaccacgaccagcgtggagtcttccaccatcgctttttcgtcagcaaccggccacggcgcgttgtcgatatcgccttcgcctttcagttcctgccacagcgtgaagcagatgtgcggggtgaacgggttaagcatacggacaacggccagcagtgcttcctgcatcagagcgcgatcctgctcgccatcggttggtgctttcgccagtttgttcatcagctccataatcgccgcaattgcggtgttgaaggtctgacgacggccgatatcatcggtcactttagcgatcgttttatgcacatcgcgacgcagcgctttctgattttcagtcagcgcatcaacgttcagtgccgcaacatcaccttttgctgtgtgctcgtaaaccagtttccagacacgtttcaggaagcggttagccccttccacaccggattcctgccattcgagagtcatatcagccggagaagcaaacatcataaacagacgaacggtgtccgcgccgtaacgttcaaccatcacctgcgggtcgataccgttgttcttgctcttggacattttgctcatgccggtataaaccagttcatggcctgccgcatctttcgctttcacgatacggcctttctcgtcacgttcaacgatagcatcaaccggggaaacccagttacgttcgccgttttcgccaacatagtagaaggcatctgccagcaccataccctgacacagcaactgtttcgctggttcgtcagagttcaccatgcctgcatcacgcatcagtttgtggaagaagcggaagtagagcaggtgcataatggcgtgttcaataccaccaatgtagatatccaccggcagccagtagttagccgcttcggaatccagcataccttctttgtactgcgggcaagtgtagcgcgcatagtaccaggaggactccataaaggtgtcgaaagtgtcggtttcacgcagtgctggcataccgttaacggtagttttcgcccactccggatctgctttaatcgggctggtaatgccgtccattaccacatcttccggcaggatcaccggcagctggtcgtccggggtcggcattacggtaccgtcttccagcgtcaccatcggaatcggcgcgccccagtaacgctgacgggaaacaccccagtcgcgcaggcggtagttcactttacgctcgccaacgcccatcgcagtcagtttatcggcgatggcgttgaaggccgcttcatggtcaagaccgttgaactcgccagagttgaacagcacgcctttttcagtcagggcttgctgagaaagatctggctcagagccgtcagctgccaggataaccggtttgatgttcaggccgtatttagaggcaaactcgtagtcgcgctggtcgtgccccggtaccgccataactgcgcccgtgccgtactccatcaatacgaagtttgctgcccaaacgggaatttcttcgcccgttaatgggtgaaccgctttaaagccagtatcgacgccttttttctccatcgtcgccatttcagcttcggcaactttggtgttacggcattcgtcaataaaggccgccagttcaggattattttccgccgctttctgcgccagcggatgacccgcagctaccgccaggtaggtacaacccataaaggtgtccgggcgggtagtgtaaacggtcagcgtgttgtcatagtcgttaacgttgaaggtgatctccacgccttcggaacgaccgatccagttacgctgcatggttttaacggtgtctggccagtgatccagtttatccagatcgttgagcagctcgtcagcgtaagcagtgattttgataaaccactgcgggatctctttacgttcaactttggtatcgcagcgccagcagcagccgtcgataacttgttcgttcgccagtacggtctggtcgttcgggcaccagttgaccgcagaagtcttcttatataccaggccttttttatacagctcggtgaagaatttctgttcccaacggtagtattccggcgtacaggttgccagctcgcggctccagtcataaccaaagcccagcattttgagctggtttttcatatacgcgatgttgtcgtacgtccacggtgccggagcggtgttgtttttcaccgccgcgccttccgcaggcagaccaaacgcgtcccagccgatcggctgcaggacgtttttgcccagcatacgctggtagcgggcgatcacgtcaccgatggtgtagttacgtacgtggcccatgtgtagtcgaccagaaggatagggaagcatagacaggcagtaatacttctctttgctctcgtcttcggttacttcaaatgtgcgcttctcatcccaatgaagctgtactttggattctatctcttccgggcggtattgctcttgcatggcagccagtggtcctgttttcaatacggctacaaatgtagcgttgaggtggtttttcagatccgcatagcatagcccaaacgtccgcgtcaaaacagcctttcgcgcactcgacgttgaaatgatgcccggattattcatacattaatttacagagtttgtgggcgtattagcaaagcaaggaacaaagaacgtctattattatagtcagttaacgacccgggagatgaaacgatgaacaaggttgctcaatattaccgtgaactggttgcgagtctgagcgaacgcctgcgcaatggcgaacgtgatatcgacgcactggtggaacaggcgcgcgagcgcgtaataaaaacaggggagttaacgcgaaccgaggtcgatgagctgacgcgagctgtcagacgtgacctggaagagttcgccatgagctatgaagagagcctgaaagaagaatctgacagcgtctttatgcgggtgattaaagaaagcttgtggcaggagctggcagacatcaccgataaaacgcagcttgaatggcgcgaagttttccaggacctcaatcatcatggggtttatcacagcggagaagtggtcgggctgggaaatctggtctgcgagaaatgtcacttccatctcccgatctacacaccggaagtgctgacgctatgcccgaaatgtggtcatgaccagttccagagacgcccgtttgagccgtaatagtctgatttcgcacagcaataaagagaatatgggccgaatgaaattccccggcccttgtttttatctttacagtaaatcttcagtctcacgaatttcctgactgacatctctggttccggaactctgaactttacgatacaggtcgagagcctgtcggagatcgacaggtcttccttctccgtagtgatacataatggccaggttataccaggcagtggcgtcattgcattcagcggctttcgtaaaccattcaaaggcagcctgataatctttctcaacgccttgtccgtgtttatacatataaccgatgttgacgtaagcgccgacgctcccctgagcggcagccttcagataccagtacatcgcttgcttatagtcctggtccaccccttcgccagcgttataatcccatgcaatttgaaactgggcgtgccgattaccctgctgtgcgcttttcaaataccagaatgcggcgagtgtcttgttttgagcaacgccttttccgtcttcataaagatcggccagattgttttgcgcgtcactatggccttgtaatgcagcttgtttgtaccagaaaaatgccagcgcatagtcttttgcgactccgttgccatttctgtacatccacccaagattattttgcgcataagacattccgctctccgcggctatctgataccagacaaccgcttctttataattgggggcttctccacgatccagtgtccagccaagggcgttggaagcgaaagtatggccttgtagggcagcttttttcagccagaagatggcttgctcattatctttatgacggcttttatcctcggtatacttttgccctaaggaatactgtgcttcacaatgaccttgctcagcggccagcttcagccagtaaaaggctttttcgtcgtccggagaatcaattgcgctatcgcgattataataaaacccaacaatatattgagcctcgcaatcgcctttttcagcacgttcgataatctcatctatacttaaattatcgcagcaactactcgtgaaaatcattatcatttccttatggttgcagataaaacatattatatttttatgtgttccatttttgcgtaagccttattttatgcgtattatgtcgcgtcagaaaagtataaataaacgagcctcgcaatgcggctaatattcatttaatgaatatttaaggataaattatatggacatggagagccaaaaaatattgtttgcactttccactccgatggaaatacgcaatgaatgctgtttacctagccatagtagtcccaaaatgtatttaggtacatgcttttttgacctttcttccagttggggaattgatgaccgtgatgacctgctgcgcacaattcaccgaatgatcgataacggtcatgccgctcggttggcagggttttatcaccgctggtttcgttatagcccatgtgaatggcgtgactatcttgctgaactaaatgagcaaggtcaggcttatgcgcaatttgtcgccagcaccgccgaatgctgtggcgaagggggaatcaaagcctgggattatgtccggatgggttttttaagccgaatgggcgtacttaataactggttgagcgaagaagaaagtctatggatccagagccgcattcatctacgggctctacgttattatagtaactggcggcaatactttgccggttatacctttggtcggcaatattggcagtctcccgaagatgatcatctgcctttattacgcgaattcttagcgcgtaaagaatacgacgattccggcaatgatatgttttatcaattatttgccagtgatgatgcgtattaccctaccttgtcctggcaaccattggcttactattctgcatgcccggaaacgcttaaggatatgagcgacctatgaaaaattgctggaagatcctcgatatagaggaaacgactgacgtcgatattatccgccgcgcttatctggcgctgttaccgtcctttcatccagaaaccgatccgcagggttttaaacaacttcgtcaggcgtatgaggaggcgctacggattgcgcagagccctgctaaatctgtttggcaaccagaagaatatgaggtagcagaacatgaaattctgctcgcctttcgtgcgttacttgcctctgatagtgaacgttttctgccctccgcctggcagcgattcattcagcaattaaattattgcagcatggaggagattgatgaattacgctggagcctgtgcacaatcgccatgaacactgcccatttatccttcgagtgcgtggtgttattagcagaaagattgcggtggttacaggaggaaaataccggggaaatagacgaagaagaactggaatcctttttatatgccattgcgaaggggaatgtttttaacttccagaccattctgcatctgcccgttgccgtgcaaaatgacaccatcgatttttaccaaatgttcgctcggatttggagtagccatccacaatggctgacattgtatttagcgcaacatcgcgcagtgattatccccgatgatgcaaaactgcacagaaatttactccgctggtatagcgcaggtcgcctggatatccccgaacttctggattacgcccagagttggcgggaaactgaacctgataatgaagatgcgccttattatgaatacgcgcaacgcgtctattgtggagaaggcgaaagcctgttggcagaactttgtgactactggcgcgagtatccctccacccaggcggatgctttaatgttgcaatggtgccgtcagcatcgggtcgattattacccattactggtgatgatgattgaagcgcgtgatctggttaacgatcagggaaaaccgctactttatgtccccggcgacagcgcccgtacgcgttttcatttatacgaaatactcagcgatgaaaaactctctgcgctggggcgtagtctggtcgagatggttttgcacaaaggacgtaagccgcggatcagtctcacgcgtgatacagaacataccttatggccattatatctagttgccaaacaattagtgcaggcctgccaacctacagaagaaagtttaatgccgattgtgagccgccttgatgcagaaaatcgttgtccactggaagcattaattattcgtcgattattaattcaggcggcgaattttaccgagaagcaaactgttgaaccggagccgcaaccgcagccaatgcccgttgacgatggtgggccaggctgtctgggcatcattaaaattattttctatatttttatctttgctggtttgatagggaaaatactccatctgttcgggtgacagtcgacgttaatgtgcgggaagcccggcaagtaatctttccgcatttttgtaatgttgtttggcggtcagttttaaccatttttgagattcataatggttaacattaataccactgccatttctgtagatcaaacctaaagtatattgagcatgagcatacccttgttcagctgcttccttataccagagaattgctttacgggtgtcgggtttgacccccagacctttgaggtagatccaccccagtttactttgcgcgcgtggattttcctgttccgcactttgctcataccagtatctcgcctgtgtataatccagtggtttaccgtcgctaccatgaagataaaattctccaaggcgatattggctcgtactgtgaccatgaatcgcggaaagctccgtggctgccgtggtgaatggaagactgcccggactgcttaaataatcaaaggcataattcaccatggctttatcacgcaacgtcgttttcttgggttggctaatacaggtaattgctgcaactataaaaattgcgaatatatacattaattttttattcatgtgtgaatgcttcgattttctttttattttgaaagcgtcaagtttatactcatcaataataaaaaagtagtcagttaatgcacttaagggattattaacaaatgaataaggaagaacaatatcttctttttgcgctttctgcgcccatggaaatacttaatcagggttgcaaacccgcgcatgacagcccaaaaatgtatactgggataaaagaattcgagctcagtagttcctggggaataaataatcgtgatgatttaattcagactatttatcagatgactgatgatggtcatgccaatgatttagctggcttatatctgacatggcatcgctcttcccctgaagagtggaaagcattaattgctggtggcagcgagagagggttgatttatacccaattcgttgcccaaaccgctatgtgctgtggggaagggggaatcaaagcctgggattatgttcgaatggggtttctgagtcgggtcggtgtgctcaacaagtggctgacggaagaagagagtttatggctgcaaagccgcgtctatgtacgagctcaccattactatcacagctggatgcactatttttccgcctatagcttaggacgtctctactggcaatcttctcagtgcgaagacaacactagcctacgcgaggcgctaaccctgtacaaatacgatagcgccgggagtcgtatgttcgaagagctggcagcgggaagcgatcgtttctatgccacgcttccctggcagccattaactgtccagtctgaatgcccggtaacgcttaaggatgtgagcgacctatgaaaacatgttggcaaatcctcgaaattgaaagcacgacgcaaatagacattatccgccaggcttatcttgctcgcttaccgttgtgtcatcccgaaaccgatccgcaagggtttaaagcattacgccaggcctatgaagaggccctgcgactggcggtaaatcctgtcgaggaagcagatgatgaagaaaaagatgctgccgctgaacatgaaatactacgtgcattcaggacattactggatagtgaaagtgatcgttttcagccttccgcctggcagaaatttattcagcaattaaatacctggaacatggaggatgtcgatcaattacgctggccgctgtgtgcaatcgccatagaagcgcgatatcttagtttaaattgtgcttctttgctggcagagcgtttgaactggcatagttttaatgacagcgaaggaatggatgaggaagaaagggaggcttttcttgaggccattcaggctggtgattgtttcgatttccttagccttctggaatatcccattgcgttgcagaaccagactgttgagtattacttcgcgctggaacgttgctgccgttaccatcctgactatgtcactgcgtttttggcgatggaaggtccgtggttaattcctgatgatgcaaagttacatcgcaaactgttgcgctggtacagcagcgtgcaaacaggtatggcggaactcattcctgtcgctcaacagtggcaaacggaagaaccagaaagcgaagatgcccggtattacttgtgtgcacaacgtttgtactgcggcgagggggaaagcctgcttgccgatctctgcgcgtactgggaaagttacccatctacacaagctgataatttgttgttgcagtggagcaagcgtcattgcccggattatttcgcgttattagtgatggttatcgaagcgcggagcatggtagatgcgcaaggtcaaccgctgaaatatgttcctggtgagagcgcccggacgcggctgttatgggcggagattttacatagcggaaaattaagcccgttaggtcaaagctttattgagagcttattcttcaagcgcaaagcatgggcgtggtggaaaagcagagtcggtagcgagacagagcaagatagtccgttcctggatttgtatcgggtagcggaacaggtagtacttgaagcgtttccgaaacaagagatgctggcccgtcttaatacaaggctggaaggcggagatgctcatccattagaggccattgtcacccggatgcttttgacgaaagtgaaactcgagccggaggatgaagatgtcgatgagccaacacctgaaaatcatgaagaaaaaaatgatgagggtgaaaaaccacagagcattaccagcattatcaaaatcagtttaacggtgctggtgataggttatgctctcggcaaaatcgcgatgttgtttagctgacgatgtgttttttgcgccgatgccggatgcagcgtttacgccgcatccggcagccgtgtttatgggatctcaatggctaaataatcgctcgcccgccgccgaacttcatccacgcgggccatatcgttactctgcaacgccgcatcaaaatcggtgatcacccggccgatctcttctcgctcgtcacccagcgcccgcgcccacaactcttccagtttggctttaaaggtgcgattgatgagcatatcgcgcggataaattttcaatgcggataaccgcgtccgactctcttcaatctgctgcgcgctcaatgttaccgggctgtggttaatcactctggacttaacgctgccgtcttccagaagcacgtcaacttcaagcaacccgttgatatcataactaaagcgaatatcaatgctctgataagccccggttttcttcaacggcacatcgaaggattccaccagaatgttgtttttaactttgtggttttctccctgatagacgttaaccgtaatactatcctgttccgggtgcatggtactataagtttctacacggctcacgggcacagtggtgtttcgttcaataatcgggctgaaaatgccggaaacgccctggcggttaacttcaacgcccaagctgtaagggcaaatatcagtgaggattacctcttcaatatcttcactgcgtaagcggcaggcggcctggattgctgcgcccagcgcgacaatggtgctcggatcgtaactttgatacggtaatttgccaaacagacgcacggcgattcgctgcaccagcggcatttgactcgcgccgccaaccagcaccagactgtcgatttgactcggcttcagacgcgcatcgcgcaacgcctgttcaatcggcactcgcaagcgattgagcagcggcaaccacaaatcttccagttcgttctcgtaaaattcgcattcccgcgtttcttcctgatactgccagcgaatgtgcaatgggctttgattgctacattttgccgcttccacacaggcgtacaaggctgccagttcactctcgttaagcgtggtcctggcgacatccgcgcgttttaaaacctcatcgaccagcatatgggtaaaatcttcgccaccaagaaagttgtcgccagcggaggcgtgaacttcaatcaccggcgtggcgtactcaagcaccgtaacgtcaaacgtgccgccaccgagatcaaacaccaggctacgggtattttgttgggtatgcaggccatacgccatcgcagctgctgtgggttcattaattaagcgtaccgcatttaacccggctaactccgctgctaaacgggtatgcttgcgttgttcatcgctgaaataagccggaacggagatcaccacatctttaatcggacgttgcagaaattcttcggcatcttcttttaaactgcgtaataccaaagaggacagttctggcgcgttaaatgtgtcgctgcctaaccgccagttggtattactgcccattgcacgtttaaataacgctgccgttttatccggatggctagtacgccgacttacagccggttttccgactaaaatatgattattttcatccatgctaattatggatggtgttaaatattcaccgaacttatttggaattaattgcgcggcaccgtctttccagacggcaattaaactattggtagtaccgagatcgataccaatggcgagttctgcattatccattgcatttatatcttgaaagaaaaagagataaacagattaagaccacccaggtaacgcgtggtgatcttaatcaatgacgtgtgttaagcgtaaaatttcagacgatcagccagtaaatcaacaaagccctgacgatcaacatcgaccattacggtggcattcggtttattgcctgtcagataataataatcaacaaccgtcataccctgggtatatttcccctgtgtttccacgccaacccagcgctcaacagaggtaaataactccggtttcaacagccaggcgatggtgcatgggtcatgcagtggtgcgccgacaaagccccatttttcgtctttatgatattcgaggaagaaatccagcagttcggcaacaatggtactaacagggttaccaatcgcgcggaaacgctcggtgtcttcaacgtggatttgtgctttatgagtaacatccagaccggccatcaccaccgggatcccactctggaagacaatttctgccgcttccgggtcaacgtaaatattaaattcagccgcaggcgtccagttacccagccccatagcgccacccataatcacgatacgggcaattttgctatgcagttccggatggctattgagcagcaaggcaacgttagtttgcggtccggtagacacaatggtgacaggttccgcactttcacgcagcgttttcgccatcagctctaccgccgtacagttttgcggtgcgaatgtcggttccggtaatgccgggccgtcgagaccgctttcgccgtgcacattgtccgcgataatcaactcacgcattaacggttttaccgcgccgcctgctaccggaatatcggtgcgattaagcaaggtcagcatacgcagaacattgcgtaaggttttttctggtgtctggtttccggcggaagacgtaattgctttgacatcaagctctggactggcgagggcgagaactattgcgatagcgtcgtcatgacctgggtcgcaatctaacagaattggcagtgccattgttgctccttgttgtgtgcttctttgcgacaagggtaacgccaggatgtaacagatacgaggggcgaaacgataaagcgtgagatggcgcgcaattgggtatgcgcgccagagtgattaatgcaggattttcgcgaggaagtcttttgcgcggtcgcttttcggatcatcgaagaaagcgtctttcgggctgtcttcgacaattttaccctcgtccataaagatcacccgattcgccactttacgggcaaagcccatttcgtgggtcaccaccatcatggtcattccttcgttcgccagttccaccatcacgtccagtacttcgttgatcatctccggatccagcgcgcttgtcggttcgtcaaacagcatcgcaataggatccatacacaacgcgcgagcgattgccacacgctgctgctgaccgccggaaagctgcgccggaaacttattggcgtgagcagaaagcccgacacgctccagcagtttcagggctttttcacgagccggcgctttatcgcgtttaagcactttcacctgcgccagggtcaggttttcgataatgctcagatgagggaacagctcgaaatgctggaataccatcccgacgcgggaacgcagctttgccagatcggttttcttgtcgttaaccacgataccatcgacggtgatttcaccttgctgcaccggttcgaggccgttgacggttttaatcagcgtacttttgccggaaccagacgggccgcaaaccaccaccacttcgccttttttcacttcggtactgcagtcggtcagcacctgaaagtgaccataccatttactaacatttttcagggtaatcattatgctgtccttcttttcaagtagctgaccaacaagctcgcgctaagactaataacgaaataaacaaatccggcaaacaggatcatctcaacctgcgtaccatcacgctcaccaatggtactggcggtacggaagaaatcggccagggataacacatacaccagactggtatcctggaacagtacgatgccctgagtgagcagcagcggcaccatcgcgcggaacgcctgcggcagaataatcagtttcatgctctgccagtgagtcattcccaacgccagcgcggcgctgctttgaccacgagaaatactttgaataccagcacggataatctcactatagtaggccgcttcaaacatgctaaacgccaccatcgcgctaattaaacggatatcattttttgggcttaatcccagcacgttttgcagaaaacccggcacgatcaggtaaaaccacagcaaaaccataactaaaggaatgctgcggaatacgttaacgtaggctttggcaaaccacgccacgggcgcaaagctggataaacgcatcaccgccagcatcgtgccccacaaaataccaatcactaccgccgtgacggtgattttcagggtgatcaccagcccgtcgagcagatatggcagggaagggacaatggaactccagtcaaactcgtacattatttgccccccatgttgccaggcaggcgaactttacgttcaaccagcgtcatcaccagcatgataaaagcgttaatcaacacatacgccagcgtaatggcggtaaagctctcccaggcatgggcactgtaatcgagcaatttacccgcctgcgccgccatatccaccagaccgatagtgctggcgatggcggagtttttcaccaggttcatcatctcactggtcatcggcgggacgataacgcgataagcattaggcagcagtacgtatcgataagcctgcggtagcgtcaggcccatcgccagcgcggcatttttttgccctcgcggcaggctctgaatcgcggcgcgtacctgttcgcaaacacgggcggcggtaaacagccccaggcagagcatggaactaaggaaaaactgaatattgggatccagctcggccttaaaccacatgccgattttctccggcagcagctccgggatcaccagataccaggtaaagaattgcacaatcaacggcacgttgcggaacagttcgacatacaacgtacccagaccagagagaaaacggtttggaacggtacgtaaaatgccgaaaaaactaccgacgaggaaagcgataatccaggcgcagatgctcaaagcgatcgtcacctgaaaaccactccagatccaaccaagataggtggtgttgccgaacggggcttgttgtaaaaaaataccccagttccagtctatagacataaatctactccagaaaaaagagggtagcagcgttaactgctaccctcgaagattgttacccagcgtattgcggttttcaggcccgatggggaacgaccatcaggcgtatagtctgtccgtgctacgtaacaatcgagagggctggaatttccgcccctggttcttgtaattagttcagtgccttgtcattcggttctttgaacagtgctttcatttcgtcactcagttcgaaattcatgttcaggtttttcggcggaattggatttttgaaccacttatcaaaccatttttccgcttcaccggaggtctgcacctgagcgatggtgtcatccatcagctttttgaactgcggatcatctttacgcaacatacaaccgtaggcctcctgagactgcggcttgccgacgatttcccagttgtctggtttcttcgctttcgcacgttcaccggccagcagagcgtcatccatcataaaggcaacggcacgaccgctttccagggtgcggaaagagtcaccgtgatctttggcgctgatgatgcgcatattcattttttgctcttcattcagtttgttgagcaaaacttcagaggtagtgccggaagtgacgactacggctttgtctttcaggttggcaaaatctttgatatcgccaccctttttggtcaacaggcgcgtaccgaccacgaaaatagtgtcagagaaagccgcctgtttttggcgttcgacgttgttggtggtagaaccacattcaaaatcgaaagtgccgttttgcagcagtggaatacggttttgactggtaatcggaatcagttttacctgcaagtccggtttgttgagtttctttttcactgcttcaacaatggcgttggagtaatcctggctgtaacccaccactttttgctgattgtcgtaataagagaaaggcacactagattcacggtgaccgacgacaatcacaccgtttttggcgattttgtccagagtactgcccgctgccggggcggcgtcatctgcctgtgccagtcctgcggaaagcgccagggcgaggattgctgtggcaggtttacgtaattgcatatccaactcctttatcttctgcgttaagaacgcatggatacccgttgtgagtgtttgtgttgttatcgtctgcaactttattgtgcagtgttgtgcctgttagggaaggtgccttaggtaacatttagtttggctaaatgtaaagatattgctgttttattgtttgtttttgcgagatgcgccgcaccattccgaagcaaaattcttaaaatgcactcttttagtgctaccgctggattactgtggtgcaactaggttgtactgatgctgtttcagggtttgccttgtataacaaagcaatagatgtgccaaagttggataggagaatattgttatccggataatgcactgatgccgcatccggtgagcgtgccgaaatatgggatgtattccggcacgataagaagggattatttacgtcgctgacgcagactcatcaacacagcagcaaaaccaaacaatgccgtcagcacccacagcggccagttgccggtacgtgcgtatggtgtgagtccggtggtcggcgtcacgttagtggttaacacctcgcgggtgaactgcgggatcatcgcctgaatctcaccctgcgggccaatcaccgccgtaatgccgttgttggtgctgcgcaacagtgggcgcgccagctccagcgcacgcattcgcgccatctggaagtgttgccatggaccaatagatttaccaaaccacgcatcgttggagatagtcagcagatagtcggtatccgggcggaagttatcgcgcacttgctcgccgagaatgatctcgtagcaaatagccgcagtaagctcaataccatttgcgctcagcggcggctggatatatggcccacggctgaagctgctcatcggcagatcaaagaacggtgctaacggacgcagaatgctctccagcgggacaaactcgccaaacggcaccagatggtttttgttatagcgatcggcactttcgtagctgtacggcgcacctttacccagcgtgatgatggtgttgtaggtatcgtagcggttctgcttattgagacgcgcgtcgacaatcccggttaccaggctgctacctttatcacgcaactcaccgtccagtgctttgaggaacggttgctgattaatttccagatcggttatcgcgctctccggccagataatcaagctacttttgcccatcagcggtgccgttgcgttgtagtaaatcttcagcgtattaagaagctggccttcgtcccatttcaggctttgcggaatatcgccctgaaccatgctaacctgaatggttttctccggttgtggggtaaaccactggatgtaacgcagcgggaagggaagggcaaacagcacgacggccaccaccagcggacgccagttgcgtttgaccaacgccagtgccagcaggccactaaccatcatcagcaggaagttaatggcttccacgcccattatcggtgccagcccttttaacgggccatcaatctggctatagccgaactgtaaccacgggaagccggtcagtacccaaccgcgcagaaactcggtcacttgccagagggcaggggcggcaatcgctacgcgcagccaggtggttttcggccacagacggctcagcacgccagcaaacagtccggtatacaggctcaaatacgccgccagcagcaccaccaggaagatgttaaccgggccaggcattccgccaaaggtcgcgatgctgacatagacccagttaataccgctgccaaagaggccaaatccccagcaaaagccaatagcggcagactggagtggacggcggttaaaggtcaacgcctgaagccccatcaggctaataatcgccgcaggccagacgtcgtaaggagagaaggccagcgttccgcaggcaccgaataataacgccagcagcaggcgaatgcgctggcgttcaattaaactggcaaaagccatgtagttatctatccagtttcggttttattcatccagcttcggctggggactgtcatccgggattttgacatgaacctgaataatacgccgactgtcggccatcgccactttgaactggtaaccgtcgatgtcgatagtttcgccacgcgccggaagatgcccaaatgcctgcatcaccagaccaccgatagtgtcgacttcttcatcgctaaagtgggtgccgaacgcttcgttgaagtcttcaatggaagccagtgcgcgtacggtccaggtatgacgactcagctgacggaagtcgatatcatcttcttcgtcatactcgtcttcaatctcaccaacaatcagttccaggatgtcttcaatggtcaccagaccggaaaccccaccgaattcgtcaataacgatcgccatgtggtaacgctgagagcgaaactctttcagcatccggtctacgcgcttactttcaggaacgacaaccgcctgacgtaacactttgtccatgctgaaggcttcagcatcgctgcgcataaacggcagcaagtctttcgccatcagaatcccttcaatgtgatctttgtcttcgctaatcaccgggaaacgactgtgggcggactcgatgatgacatcaagacattcgtccagcgtctggttgcgtttcagggtaatcatctgggagcgggggatcatgatgtcgcgaacgcgttggtctgcgatgtccatcaccccttcgagcatatcgcgcgtatcttcgtcgataaggtcgttctgcccggaatcacggatcagcgccagcagttcgtcacggtttttcggttcaccgtggaaaagttggctgagtaacagggagaaaaatcccttcttgttgcttatcgtgtcactactgtgactattgtcgtcgctcatggcgtcgtatgggttctcatgttagttaatcaaaacgccgtcgttaatcaccaacggcggggacgtctgccagtcaaatgcctggcaaattattctttctcggcaatgtacggatcctcatagcccagagcaagcataatctctgtttcgagggcttccatttcttctgcttcgtcatcttcgatgtgatcgtaacctaacaaatgcagactgccgtgcaccaccatatgcgcccagtgcgcctccagtggtttgccttgctcctgagcttccttctcaaccacctgacggcagataaccagatcgcccagtaggctcatttccatgccaggcggcacttcaaacgggaaggagagcacgttggtcggcttatccttaccgcgataggtcagattcagactgtggctttcggcggtatcgaccacgcgaatcgtcacttcgctttcttcctgaaactgcgggatcaccgcattcagccatgtctgaaactggctctcttccggtaacccggaattatcttcacatgccagttgtaaatcgaggatcacctgactcatttttgttcctgttcttcgcgcttgcgttctgctgccagcgccgcttttcgtttttgttcggcttcttcccaggcttcataggcgttaacgatacgcgccaccacagggtgacgaaccacgtcttcgctgtggaagaagttaaagctgatctcttcgacatcggccagcacttcgatggcgtgacgtaagccacttttagtattacgcggcaggtcgatctgtgtgacgtcgccggtgataaccgctttactgttaaaaccgatacgggtcaggaacatcttcatctgttcgatggtggtgttctggctctcatcgagaatgataaacgcgtcgttcagcgtacgaccacgcatataggccagcggtgcgacttcaataacgttgcgctcaatcagtttctcgactttctcaaagcccagcatttcaaacagcgcgtcgtacagcgggcgcagatacgggtctactttctggcttaaatcgccaggcaggaagcccagtttctcaccggcttctactgccggacgagtcagcagaatacggcgaatttcctgacgctccagggcatcaactgccgcagccactgccaggtaggttttacccgtacccgccgggccaacgccgaaggtaatgtcatggtcgagaatattggcgatgtactgcgcctggtttggcgtgcgcggcttaattacgccgcgtttggttttgatattgaccgctttgccgtactccggcacgctctccgcgctttgctccagtacccgcgcttctttaatcgcaaggtggatctgttccggttcgatatcctgaatctgaccgcgcatcggggcagtatcgacatacaggctacgcagaatgtctgccgcagcggtgacgcaaatcggacggccggtcagtttaaagtggttatcgcggcgattgatctcgatgccgagacggcgttcgagctgcttgatgttgtcatcaaacgggccgcacaggctcaacagacgcgcattgtctgctggctccagggtgatttcgcgagtgtctatgttcaaaccgttcctcttatctgtatgccgccggaagctgaacattcaccggcctataaggaaattattcacgccacaggaaaaaggcgcaagcattgcaataaagatggggataaagagagaaaaaacaaggcccaccggaacggcaggcctgagaattacggctgataataacccacgccaaggtcgttttctttgcgggtacgggcaatcacactttccggtgtttctgccacgcgcagacccatttcatcttcagtacgcaccactttaccgcgcagagagttcgggtagacgtcggtaatttctacatcgacgaatttaccgatcatatccggcgtgccttcgaagttgaccacgcggttattttccgtacgcccggaaagctccatgatgctcttacggcttgtaccttctaccagaatacgctgggtggtgccgagcatccggcggctccacgccatcgcttgctgattaatgcgctcttgcagaatatacagacgctgcttcttctcttcttccggaacatcatcaaccatatcggcggctggtgtacccggacgtgcagagaagataaagctgtagctcatgtcgaaattgacgtcggcaatcagcttcatcgttttctcgaagtcttcggtggtttcgccagggaagccaacgatgaaatcagaactgatctgaatatctggacgcgccgcacgcagtttacggatgatcgctttgtactccagcgccgtatgggtacggcccatcaggttcagaatgcgatcggaaccgctctgtaccggcagatgcaggaagctcaccagctccggcgtgtcgcgatacacttcgatgatatcgtcggtgaattcgatcggatggctggtggtaaagcgaatacgatcgatcccgtcgatcgcagcaaccagacgcagcagatcggcaaagcttccggtggtgccgtcgtagttttcaccacgccaggcgttcacgttctgaccgagcaggttgacttcacgcacgccctgagccgcaagctgggcaatctcaaacagaatatcgtcggacggacggcttacctcttcaccacgggtgtaaggcaccacgcagtaggtgcaatatttattgcagccttccatgatggagacaaacgcggtcggcccttcggcgcgcggttccggtagacggtcaaacttctcgatttccgggaagctgatatctacaaccgggctgcggtcgccacgcacggagttgatcatctccggcagacggtgcagcgtttgcggcccaaaaataatatcgacatagtgggcgcgctggcgaatgtgctcgccttcttggcttgccacgcagccaccgacgccgataatcaggtctggattcttctcttttaacagtttccagcgacccaactgatggaagactttttcctgagccttctcgcggatactgcaggtgttcagcagcagcacatccgcttcttccgccacgtcggtcagttgatagccgtgggtggcatccagcagatcggccatcttgctactatcgtactcgttcatctgacagccccaggttttaatatggagttttttggtcatcgacttgctcttgcgaaatagtagccaggaatgcagggcgcatagtgtaatgctttgctgccgttgtgaccagtatgagcgttatcagcccttaggggtaaaaatcctgtaaacttaaagcatattgctaacaggatgattgaccatgacaaatcaaccaacggaaattgccattgtcggcggaggaatggtcggcggcgcactggcgctggggctggcacagcacggatttgcggtaacggtgatcgagcacgcagaaccagcgccgtttgtcgctgatagccaaccggacgtgcggatcagcgcgatcagcgcggctagcgtaagtttgcttaaagggttaggggtctgggatgcagtacaggctatgcgttgccatccttaccgcagactggaaacgtgggagtgggaaacggcgcatgtggtgtttgacgccgctgaacttaagctaccgctgcttggctatatggtggaaaacactgtcctgcaacaggcgttgtggcaggcgctggaagcgcatccgaaagtaacgttacgtgtgccaggcagcctgattgcgctgcatcgccatgatgatcttcaggagctggagctgaaaggcggtgaagtgattcgcgcgaagctggtgattggtgccgacggcgcaaatagccaggtgcggcagatggcgggaattggcgttcatgcatggcagtatgcgcagagctgcatgttgattagcgtccagtgcgagaacgatcccggcgacagcacctggcagcaatttactccggacggaccgcgtgcgtttctgccgttgtttgataactgggcaagcctggtgtggtatgactctccggcgcgtattcgccagttgcagaatatgaatatggcacagctccaggcggaaatcgcgaagcatttcccgagccgtctgggttacgttacaccgcttgccgctggtgcgtttccgctgacgcgtcgccatgcgttgcagtacgtgcagccagggcttgcgctggtgggcgatgccgcgcataccatccatccgctggcggggcagggagtgaatcttggttatcgtgatgtcgatgccctgattgatgttctggtcaacgcccgcagctacggcgaagcgtgggccagttatcctgtcctcaagcgttaccagatgcggcgcatggcggataacttcattatgcaaagcggtatggatctgttttatgccggattcagcaataatctgccaccactgcgttttatgcgtaatctcgggttaatggcggcggagcgtgctggcgtgttgaaacgtcaggcgctgaaatatgcgttagggttgtaaccttacaacattgccggatgcgtgccaaccgtaggtcggataagacgcggcagcgtcgcatccgacattgaaggataagacgtgtcaacatcgcattcgacattgaatgaacgcagaaaagcaaaaagctcgccgaagcgagcttttttaatgtggctggggtacgaggattcgaacctcggaatgccggaatcagaatccggtgccttaccgcttggcgataccccaactgggtgcacttacaaggtaagcgtcttgaataaattggctggggtacgaggattcgaacctcggaatgccggaatcagaatccggtgccttaccgcttggcgataccccaacaaattggttttgaatttgccgaacatattcgatacattcagaatttggtggctacgacgggattcgaacctgtgaccccatcattatgagtgatgtgctctaaccaactgagctacgtagccagattgtttcttcgatggctggggtacctggattcgaaccagggaatgccggtatcaaaaaccggtgccttaccgcttggcgataccccaataaccgggcggtgaaccgcttactcgaagaagatggctggggtacctggattcgaaccagggaatgccggtatcaaaaaccggtgccttaccgcttggcgataccccatccgtacaacgctttctggtgaatggtgcgggaggcgagacttgaactcgcacaccttgcggcgccagaacctaaatctggtgcgtctaccaatttcgccactcccgcaaaaaaagatggtggctacgacgggattcgaacctgtgaccccatcattatgagtgatgtgctctaaccaactgagctacgtagccatcttttttttcgcgataccttatcggcgttgcggggcgcattatgcgtatagagccttgcagcgtcaacctctttttcaaggaaaattgctcgaaagtgactgtttggttaggttgcgaacagcgtggcgctatattcgtcaattattgtttactttgtgttttttcccaccctacagccattcttttgtcatacaggatgaaattcggaatttaacaatagtggtgggaaattaatctatgaaatactggcctacagtgatgagttgtcaaacagtgatgtggcaaacccggaacatttccttactgcatatcagaatcaacaagcacctcaataactgaaacagccccggatttcaccggggctgtttcgcatttcttacttatacgcgctctggtgaacaccaaccgcgcgaccagacggatcgtccattttcttgaacgcttcatcccattcgatcgctttagcggaagaacaagcgacggaaggaccgcccggcacgcactcagcggcgctcggaagcgggaatagttcttcaaagatctcccgatacaagtacgcttctttagaggttggcgtgttgtacgggaagcggaagcgggcagtttccagttgctgatcagaaacctgctgcgcagccacttctttcagggtgtcgatccaactgtaaccgacgccatcggagaactgctctttctgccgccaggccacgcttgcaggcagatacgcttcaaaacattcacgcaggatgtgtttttccattttgccgttaccgcacattttatcctgtgggttaatacgcatcgccacatcaaggaattttttgtcgaggaacggaacgcgtgcttccacgccccaggcactcatcgctttgttggcacgcgcgcagtcatacatatgcagggccagcagtttacgcaccgtctcttcatgcagttctttggcattcggtgctttgtggaagtaaagataaccgccgaacacttcatcagaaccttcaccggacagcaccattttaatgcccatcgccttgatcttacggctcattaaatacatcggtgtactagcgcgaatagtggtcacatcataagtttcgatgtggtaaatcacgtcgcggatggcatccagaccttcctgtacagtgaagtgaatttcgtgatgcaccgtgcccagatggtttgccacttcctgggctgctttcagatccggactacccggcagacctacagcaaaggagtgtaactgcggccaccaggcttcagagcgttcctgatcttccacgcgacgggctgcgtatttcttggtgatagcggaaataatactggaatccagaccaccagaaagcagcacaccgtaaggcacatcagacatcagatggcttttaacactatcttccagtgcctgacgcagctcgtttttgtcggtcacgttatctttcaccgcatcgtagtcgaaccagtcgcgatgatagtaagaacggatttcgccgtcctggctccacaaatagctccccgccgggaactctttaatcgtgcggcaaactggcaccagcgctttcatttcactggccacatacagctgaccgtgttcgtcataccccatatacagtgggatgatccccagatggtcgcgaccaatcaggtaggcatctttttcgctgtcgtacagtgcaaaggcaaacatgccctgcaagtcgtcgagaaattccggccctttttcctgatacagcgcgaggatcacttcacagtcagacccggtctggaactggtaacgatcgccatattcggcgcgcaatgcctggtggttgtagatttcaccgtttaccgccagtacgtgggttttttgttggttgtagagaggttgcgcccccgcgttaacgtcaacaatactcagacgttcgtgggcgagaatggcgttatcgctggcataaataccggaccagtccgggccacgatgacgcatcaggcgactcagctcgagggctttcttacgcagctcaactgcgtctgttttgatatcgaatacgccaaaaatactacacataaccttctccgttaacctggtatttgttgcttgttgtgtttgcttgtttaaaaaaatgccgcaaagcagcactgtgcgcaagcgatttggcggtgaaaaaataaaaaacgtaatggtgattgtcgattggtgaaaaaaggtctggtgtgaggatatatttattgatgaatcgataatttttagcgggttttattgaatgtttatattttacgggggccaaattgctgacaaagtgcgatttgttcatgccggatgcggcgtgaacgccttatccggcctacaaaagcatgaaaattcaatatattgcaggagctgcgtaggcctgataagcgtagcgcatcaggcagtttggcgtttgtcatcagagccaaccacgtccgcagacgtggttgctattcagataacgtcgatttcagcgacactcgggtaaatccagctggggcggaaaggcatactgtcgatatcgtcgaggctgctaacaccagaaagcaccagaatcgtctccagacctgcctggaagccggccagaatatcggtacgcaggttatcgccgacaatcaccgtttcttcgctatgcgcctgcattttgtttaatgctgcgcggatgatccacgggctgggcttaccaacatagaacggtttgcgcccggagattttctcaatccctgcacacaacgcgccacaagcgggataaaaaccgcgcccgtgggtgtccggattggtggcgataaaacgtgcaccgttagcgacgaaataggctgctttatgcatcatgtcccagttgtaggaacgcgtttcgccaacaatcacgaaatcagggttcacatcggtaatagtgaaaccggctttgtacagttcatgaatcagtgcgccttcgcccaccacatacgctttcttgccttcctggcgacgcaggaaatcggcagtcgccatcgcagaggtataaaacacgctgtcaggtacatcgacacctgcggtggcaaagcggttcgccagatcttgcccagtctggctaggatagttggtcagcaacaccagcggcaggcctttatccataatcccgtgcaaaaattccgctgcacccggtacggcgacgttatcgtgcatcagcacgccgtcgatatcgcaaattacatttttaatggtcatggactacccagaatattgacaacaataagcgccactataaaagcacattaattttccagcaaatgctggagcaaaataccgttgagcatggcgcgttttaccagcgcaaaagcgccgattgcgctgcggtgatccagctcagaacgtaccaccggcagattagtgcgaaacgccttcagcgcctgggtattaatgcagctttcaatagcagggagcagcactttatcggcttcggtgatttcaccggcaataacaattttttgcggattaaataagttgatagcaatggcgatggttttacccagatgacgaccgacatactcaattacttcgctcgccagactatcgcctttgttcgcggctttgcagatagttttgatggtgcagtcgtccagcggcacgcggctctggtagccctgctttaacagattcaacacccgttgttcaatggcagcgttggcagcgatagtttccaggcagccaaagttgccgcagtggcagcgttcacccagcggttcgacctgaatatggccaatttcaccgacgttgccgttgcggccaataaaaatgcgcccgttagagataatcccggccccggttccgcgatggacacgcaccagaatggagtcttcgcaatcctgacttgcaccgaagtagtgctccgccagcgccagactacggatatcgtgaccaacgaaacaggtcactttaaaacgttcttccagagcttctaccagcccccagttttctacctgaatatgcggcatgtaatgaattttgccgctgtccgggtcaacaagccctggcaggatcacgctaatcgcgatcagctcgcgcagtttgcgctggtagctatcaataaactgagcaatggcattcaacagggcatgttccagcgtttgctgggtacgttccggcagcgggtaatgttcttctgccagcactttgctgctgagatcaaacagagtgatggtggcgtcatgacgaccaagccgtacgccgattgcgtggaaattgcgggtttcggtgacgatggagatagcgcggcggcccccggtggaggcctgctgatcaacttctttgatcagcccgcgttcgataagctgacgcgtaattttggttacgctggcgggggcaagctggctttgctcggcaatctgaatccggctgattggcccgtactggtcaatcaggcgataaaccgccgcgctgttaagctgttttacgagatcaacattacctatctgagcttgtccgcctggtgtcatactttctcttattgagttacgacctcgttaccgttaacgatggtcttggtgattttaaaatcaggtgtgaatgcagtcaggttggctactttacctgcggcgagtgtgccgagacgtttctcaacgccaatcgcacgcgccggatagagcgtcgccatacgtagcacttcatccagtgcgataccgcaatgttcgaccagattacgcacgccttcaatcatggttaaggaactaccgcttaacgtaccgttctcatccacacaaagtccgttacggtagtatattgttttacccgcaaaaatgaactgttcaatgttggcacctgctggcgcggtggcgtcagtaaccagacacagtttgtcgcctttcagacgtttagcgttgcgaatgttggcgtaatcaacatgcaggccatcagcaataataccgcaataaatgtcagcttcgtcgaggatcgcgcccgccaggccaggttcacgaccggtaatatacggcatcgcgttgtacagatgggtggcaaaggtaatccccgcgcggaaaccggcttttgcttctttcaacgtcgcgttggagtgaccggcagaaaccacaatcccggcatttgccagtttgctgatgacttccgcaggaaccatttccggtgccagggtcactttggtaatgacgtcggcgttttcacacaggaaatcgaccagcgcggcatcaggcttacgcacaaaattcggattatgggtgcctttttttaccagattcagccacggaccttccagatgcagacctaacgcctgattcggatgttttgccaggtactcgcgcataacgcgcacgccctgtttcatcagctcatcgctggtggtgataagcgtcggcagatagttagtacagccacttttctcattggctttctgcatgatttccagcgtttccacgctgaccgcttcagcggtgtcgttaaactgtacgccgccgcagccgtttaactgcacatcgataaaaccgggggagagaatggccccgttcagactacgttgttcgatctctggcggcagttccgctaccggacagacgcttttaatcaggccatcagcgataacaaccgcgtggtcatcaagaaattcgtggccggtaaagatccggccctgggttaatgcatacattctgacccccgattttaaaaaatattgccctgagcaaggagccagggcagggataacaattacagacctttgatattttctgcttctaattcattgaaatatcttaaagtcttaactttcagctccatggtggaaggttcatcgcacaccatgatcgctttcggatgcagttgcagacagctgatggtccacatatggttcacgcaaccttcaacggcggcctgcagcgccagtgctttctggctacccagcaccagaatcatcacttcttcggcatccagcagtgtaccaacaccgacagtcagggcatattttggcacctgattaacatcgttatcaaagaaacgagagtttgcgacgcgagtgtcatgagtcagggttttgatacgagtacgagaagccagagaagacgccggttcgttaaatgcaatatgaccgtcgttacctacaccgcccataaacagatgaatttttccgtaagaacggattttttcttcatactggcggcactcggcgtcgatatccggggcgttgccgttgagaaggttgatgttttctgctggaatatcaacgtgatcgaagaaattacggtgcataaagctgtagtagctttccggatgctctttcggcagaccgacatattcgtccatgttgaaggtgacaacgtgcttaaagctgacctggcctgctttatgcatttcgactaacgctttataggtggtcatcggcgtgccgccagtcggcaggcccagtacaaacggacgatcggcagtcggtttgaacgcattgatacgattgacgatatggcgagcagcccatttgccgacctgttcagcggtagtcagggggatcagtctcattattcacctcaataagtaaaatgtaagccgttggcggattaggcatctttaagcgtaacctggatttgcgcagacaggcgtcaatccgacctgattttttgaatgataaaataagttttctggtttagccagtaaaagggagtgataataacgatatttggtgacaaaactcacaaaagacacgcgtttaatttgcgatacgaattaaattttcacacactctgtagcagatgatctaacaatctgattacagaacatcggcagtacaatttgcagcaaaataaaaatacggcttgaaacgagccaaatagggttctcgtagggggaataagatgaatattttaggttttttccagcgactcggtagggcgttacagctccctatcgcggtgctgccggtggcggcactgttgctgcgattcggtcagccagatttacttaacgttgcgtttattgcccaggcgggcggtgcgatttttgataacctcgcattaatcttcgccatcggtgtggcatccagctggagcaaagacagcgctggtgcggcggcgctggcgggtgcggtaggttactttgtgttaaccaaagcgatggtgaccatcaacccagaaattaacatgggtgtactggcgggtatcattaccggtctggttggtggcgcagcctataaccgttggtccgatattaaactgccggacttcctgagcttcttcggcggcaaacgctttgtgccgattgccaccggattcttctgcctggtgctggcggccatttttggttacgtctggccgccggtacagcacgctatccatgcaggcggcgagtggatcgtttctgcgggcgcgctgggttccggtatctttggtttcatcaaccgtctgctgatcccaaccggtctgcatcaggtactgaacaccatcgcctggttccagattggtgaattcaccaacgcggcgggtacggttttccacggtgacattaaccgcttctatgccggtgacggcaccgcggggatgttcatgtccggcttcttcccgatcatgatgttcggtctgccgggtgcggcgctggcgatgtacttcgcagcaccgaaagagcgtcgtccgatggttggcggtatgctgctttctgttgctgttactgcgttcctgaccggtgtgactgagccgctggaattcctgttcatgttccttgctccgctgctgtacctcctgcacgcactgctgaccggtatcagcctgtttgtggcaacgctgctgggtatccacgcgggcttctctttctctgcgggggctatcgactacgcgttgatgtataacctgccggccgccagccagaacgtctggatgctgctggtgatgggcgttatcttcttcgctatctacttcgtggtgttcagtttggttatccgcatgttcaacctgaaaacgccgggtcgtgaagataaagaagacgagatcgttactgaagaagccaacagcaacactgaagaaggtctgactcaactggcaaccaactatattgctgcggttggcggcactgacaacctgaaagcgattgacgcctgtatcacccgtctgcgccttacagtggctgactctgcccgcgttaacgatacgatgtgtaaacgtctgggtgcttctggggtagtgaaactgaacaaacagactattcaggtgattgttggcgcgaaagcagaatccatcggcgatgcgatgaagaaagtcgttgcccgtggtccggtagccgctgcgagtgctgaagcaactccggcaactgccgcgcctgtagcaaaaccgcaggctgtaccaaacgcggtatctatcgcggagctggtaagcccgattaccggtgatgtcgtggcactggatcaggttcctgacgaagcattcgccagcaaagcggtgggtgacggtgtggcggtgaaaccgacagataaaatcgtcgtaagtccagccgcagggacaatcgtgaaaatcttcaacaccaaccacgcgttctgcctggaaaccgaaaaaggcgcggagatcgtcgtccatatgggtatcgacaccgtagcgctggaaggtaaaggctttaaacgtctggtggaagagggtgcgcaggtaagcgcagggcaaccgattctggaaatggatctggattacctgaacgctaacgcccgcagcatgattagcccggtggtttgcagcaatatcgacgatttcagtggcttgatcattaaagctcagggccatattgtggcgggtcaaacaccgctgtatgaaatcaaaaagtaatctgctttatgcctgatgcgacgcttgagcgtcgcatccaacaatgacaagcggtggagatcttctctgccgctttttttttcatcaatcatccccataatccttgttagattatcaattttaaaaaactaacagttgtcagcctgtcccgcttataagatcatacgccgttatacgttgtttacgctttgaggaatccacgatgagtgaggcagaagcccgcccgactaactttatccgtcagatcatcgatgaagatctggccagtggtaagcacaccacagtacacacccgtttcccgccggagccgaatggctatctgcatattggccatgcgaaatctatctgcctgaacttcgggatcgcccaggactataaaggccagtgcaacctgcgtttcgacgacactaacccggtaaaagaagatatcgagtatgttgagagcatcaaaaacgacgtagagtggttaggttttcactggtctggtaacgtccgttactcctccgattattttgatcagctccacgcctatgcgatcgaactgatcaataaaggcctggcgtacgttgatgaactgacgccggaacagatccgcgaataccgcggcaccctgacgcaaccgggtaaaaacagcccgtaccgcgaccgcagcgttgaagagaacctggcgctgttcgaaaaaatgcgtgccggtggttttgaagaaggtaaagcctgcctgcgtgcgaaaatcgacatggctagtccgtttatcgtgatgcgcgatccggtgctgtaccgtattaaatttgctgaacaccaccagactggcaacaagtggtgcatctacccgatgtacgacttcacccactgcatcagcgatgccctggaaggtattacgcactctctgtgtacgcttgagttccaggacaaccgtcgtctgtacgactgggtactggacaacatcacgattcctgttcacccgcgccagtatgagttcagccgcctgaatctggaatacaccgtgatgtccaagcgtaagttgaacctgctggtgaccgacaagcacgttgaaggctgggatgacccgcgtatgccgaccatttccggtctgcgtcgtcgtggttacactgcggcttctattcgtgagttctgcaaacgcatcggcgtgaccaagcaggacaacaccattgagatggcgagcctggaatcctgcatccgtgaagatctcaacgaaaatgcgccgcgcgcaatggcggttatcgatccggtgaaactggttatcgaaaactatcagggcgaaggcgaaatggttaccatgccgaaccatccgaacaaaccggaaatgggcagccgtcaggtgccgtttagcggtgagatttggattgatcgcgccgatttccgcgaagaagctaacaagcagtacaaacgtctggtgctgggtaaagaagtgcgtctgcgtaatgcttatgtgattaaggcagaacgcgtcgagaaagatgccgaaggtaatatcaccaccatcttctgtacttatgacgccgataccttaagcaaagatccggcagatggtcgtaaagtcaaaggtgttattcactgggtgagcgcggcacatgcgctgccggttgaaatccgtttgtatgaccgtctgttcagcgtgcctaacccaggtgctgcggatgatttcctgagcgtgattaacccggaaagcctggtgatcaaacagggctttgctgaaccgagcctgaaagatgcggttgcgggtaaagcattccagtttgagcgtgaaggttacttctgcctcgatagccgccattctacggcggaaaaaccggtatttaaccgcaccgttgggctgcgtgatacctgggcgaaagtaggcgagtaattttaagtttcgctatgccggatggggcgtttacgtcgcatccggcaaggaacagacaaacagtttcaaacgctaaattgcctgatgcgctacgcttatcaggcctacatgatctctgcaatatattgagtttgcgtgcttttgtaggccggataaggcgttcacgccgcatccggcaagaaacagcaaacaatccaaaacgccgcgttcagcggcgttttttctgcttttcttcgcgaattaattccgcttcgcaatttatccataaaataaatttaaaataacaaaacataattaaataaaatgtaaccgctttcatcttgctggaatttcacgcttttattcttctgcaagcctttcaaccgcaaacttaagccttgtaacaaaaatcatcaaaatatgtgcggttgctcatgttcttacattctggttacagaaagagattgataattcgcgtcgcgaaaaatagtctgttcctgtagtcagcgagacttttctcaacgctacttttttaatttttattttttcgctgttcacctttggtgcagcaatttatacgtcaaagaggattaacccatgcgtacgtttagtggcaaacgtagtacgctggcgctggctatcgccggtgttacagcaatgagcggctttatggcaatgccggaggctcgcgccgaaggattcatcgacgatagtaccttaaccggcggtatctattactggcagcgtgaacgcgaccgtaaagatgttaccgacggcgacaaatacaaaaccaacctttctcactccacctggaatgccaacctcgattttcagtccggttatgctgctgatatgttcggccttgatattgctgcgtttacggcgattgaaatggcggaaaacggcgacagctcccacccgaacgaaatcgcgtttagtaaaagtaataaagcctatgacgaagactggtccggcgacaaaagcggtataagcctgtataaagctgcggccaaatttaaatacggtccggtttgggcgagggcaggttacattcagccaactggtcaaacgctgttagcgccgcactggagctttatgccaggtacttatcagggggcggaagccggggcgaattttgattacggcgatgctggtgcgttgagtttctcctacatgtggaccaacgaatacaaagcgccgtggcatctggaaatggatgagttttatcagaacgataaaaccaccaaagttgattatctgcactcctttggggcgaaatacgacttcaaaaataacttcgtactggaagcggcatttggtcaggcggaagggtatatcgatcaatattttgccaaagccagctacaaatttgatatcgccggtagcccgttaaccaccagctaccagttctacggtacccgagataaagttgacgatcgcagcgtcaacgacctttatgacggcaccgcctggctgcaagcgttgacctttggttaccgggcggctgacgtagtggatttgcgcctcgaaggcacctgggttaaggctgacggtcagcagggatacttcctgcaacgtatgactccaacctacgcttccagtaacggtcgcctggatatctggtgggataaccgttctgacttcaacgccaacggcgaaaaagcggtcttcttcggtgcgatgtatgacctgaaaaactggaatcttccaggcttcgccatcggcgcttcctacgtttacgcatgggatgctaaacctgcgacctggcagagcaatccggatgcgtactacgacaaaaaccggactattgaagagtctgcctacagcctggatgcggtctataccattcaggacggtcgcgccaaaggcacgatgttcaaactgcatttcaccgaatacgacaaccactccgacatcccaagctggggcggtggttacggcaacatcttccaggatgagcgtgacgtgaaatttatggtaatcgcaccattcaccatcttctgatgcccgacgcggcaggttttgtgcctgccgcacgtttgaggaatttgctatgaaaaaactgattctcatcgccataatggcaagcgggctggtagcttgtgcgcaaagtaccgcgccacaggaagacagtcgtctgaaagaggcatacagcgcctgtatcaacaccgcacaaggtagcccagaaaaaattgaagcctgccagagcgtgttaaacgtgctgaagaaagagaaacaacatcagcagtttgccgaccaggaaagtgtacgcgtactggattatcagcagtgtctgcgtgcaacgcaaaccggaaatgatcaggcggtgaaagccgattgtgataaagtctggcaggaaatacgcagtaataacaaataagtgagagctgtaactctcgcttttcttatttcccttgcataaaaaagccaacccgcaggttggcttttctcgttcaggctggcttatttgccttcgtgcgcatgttcatcttcgcggcaatcgccttcggcacagtgaccgtaaagatagagactgtggttagtcaggcgaatgccatgttttgcggcaatttcacgctgacgcgcttcgatggaatcatcactaaattcgataaccttgccgcagtcgaggcagatcaggtgatcgtggtgatgttgctgtgtcagttcaaatacggatttaccgccttcaaaattgtggcgggtgacgataccagcgtcgtcaaactggttcagtacgcgatataccgtagccagaccaatttcttcacccatatcgatcagacgtttgtataaatcttccgcactgacgtgatggttgtccggctcctgaagaacttccaggatttttaaacgaggaagcgttactttcaggccagctttctttagggcggtattgttatcagtcatgcggaatctgtcctgttactaagcggttcacttcattagaagaagtgacagaatttgctcttgagataatgcgtatcattatagaattgccacgcctaaatgaaaaccacaagtccctggcaaatattgttaataaaaacgtggcacagcttacatttacaacggcaaggccacttgaacaccgggacattgtacaggtacaacagcaaaagttacaaatttgtagcaattattttgattggcattatctattaatacggcgtagacatgagtctacgccgcatcacatcaggcattgagaatttcgtcgagatgcaactcttcagaaatctgtttaacccatttttctacacgttcagcggtcagttccggctgacggtcttcgtcgatagccagaccgacaaagtggtcgtcatctgccagacctttacttgcttcgaaatgatagcccgcagttggccagtgaccaacgatggttgcaccgcgcggttcaatgatgtcgcggatggtgcccaatgcgtcgcagaaatattcggcgtaatcttcctggtcaccacaaccaaacagcgcaaccagtttgccgttgaaatcaatctcttcgagagtcgggaagaagtcatcccagtcacactgcgcttcgccgtaataccaggttgggatgcccagcagcagaatgtcataagcttccagatcttctttgctgctttttgcaatgtcatggacatcggcaacgtctttaccaagctgtttttgaatcatttttgcgatattttcggtattaccggtgtcgctgccgaaaaagatgccagtgatagccatgagtgaaataacctcttgaaacttattgaaatgggggtggaaaattgcccacggataaaggcaatcatagcagaacaggcagtcttgcggaatcagcaaacgagcaggactgcacactgtgctacatgaaagtggaaatttaaacgatgccctgactacgcagcgccgccagttgctgcattaacatctcttcgatcagttcgctacggctcatattgcggctctccgccagctcgttcagcgcctcgacagcttccgcgttcagcttcagttcgacacgcttaaggccacgtactttgtcgcgttttagctggttgcgtttattaatacgcagctgttcatcgcggctaagcggattagttttcggtcgtcccggtcgacgctcgtgcgcgaacagatctaatgtcgtacggtccgtttgttctttggccatgatcttggtgacttcgggggaaacaatcagccaggcctctgcccggatggatagcgcgccataatacatcagcgcgatgagtcacgccaacgcccacgcgcggaaagcgacgcggacgctgggtttttaatcagttgcgttaatcattgagatagcgacggatagcgcgtaataccgcatccggtttttcagcatggacccagtgacccgcgcctgcaatcacatgcgcccgtgcctgtggaaattgagccagtaaatcatcacggtactgctcgctaacatacggagaattgccgccagggataaacagggcagggtgatcccatgccgggattttctcccaacctacaatatgcggatactgatcccacaataccggcacgttaaagcgccactccccgtcaacaaaagatttcagcagaaactgaatcaccccttcttcattaagatgctggcgcattattgctgctgcttgctggcgagtttgtgcgtcgctttcactgaccgcgttgatagccgcaaaaatctcatcatgacggcgtacgtgatagtcgaccggcgcgatatcgatcgccaccagtttatcgatgcgatcggaggctagtgcagtaagtgccattaccgctttaccgcccatggagtgaccgataaatgttgctttgtcgatctgctgtgcatccagagtatcaacaagatcctgcgccatcgccgggtaattcattaccggatctctcggactaagaccgtggttacgcatatcaacctggatgatattgtgatcgtttaccagatcgcgagccagtacgccaaggttgtcgaggctgccaaacagaccgtggacaagaacgatgggagaattattgtgctggttttgtgcagtttgcgcgcggatattcaatttcatggcaaagttctttttttcgcgttgtcgggttagggtattatgttgaccattgtgccacagggctgcaacaaataaggtttattccgagtttttctgcaagccaggcttgacgctatccgctgccgggatttattcatatactcctggcgacttgtattcagctaagacactgcactggattaagatgaaaacgattgaagttgatgatgaactctacagctatattgccagccacactaagcatatcggcgagagcgcatccgacattttacggcgtatgttgaaattttccgccgcaagtcagcctgctgctccggtgacgaaagaggttcgcgttgcgagtcctgctatcgtcgaagcgaagccggtcaaaacgattaaagacaaggttcgcgcaatgcgtgaacttctgcttagcgatgaatacgcagagcaaaagcgagcggtcaatcgctttatgctgctgttgtctacactatattctcttgacgcccaggcgtttgccgaagcaacggaaagcttgcacggtcgtacacgcgtttactttgcggcagatgaacaaacgctgctgaaaaatggtaatcagaccaagccgaaacatgtgccaggcacgccgtattgggtgatcaccaacaccaacaccggccgtaaatgcagcatgatcgaacacatcatgcagagcatgcaattcccggcggaattgattgagaaggtttgcggaactatctaaaacgttgcagacaaaggacaaagcaatggcaatccacaatcgtgcaggccaacctgcacaacagagtgatttgattaacgtcgcccaactgacggcgcaatattatgtactgaaaccagaagcagggaatgcggagcacgcggtgaaattcggtacttccggtcaccgtggcagtgcagcgcgccacagctttaacgagccgcacattctggcgatcgctcaggcaattgctgaagaacgtgcgaaaaacggcatcactggcccttgctatgtgggtaaagatactcacgccctgtccgaacctgcattcatttccgttctggaagtgctggcagcgaacggcgttgatgtcattgtgcaggaaaacaatggcttcaccccgacgcctgccgtttccaatgccatcctggttcacaataaaaaaggtggcccgctggcagacggtatcgtgattacaccgtcccataacccgccggaagatggtggaatcaaatacaatccgccaaatggtggcccggctgataccaacgtcactaaagtggtggaagacagggccaacgcactgctggccgatggcctgaaaggcgtgaagcgtatctccctcgacgaagcgatggcatccggtcatgtgaaagagcaggatctggtgcagccgttcgtggaaggtctggccgatatcgttgatatggccgcgattcagaaagcgggcctgacgctgggcgttgatccgctgggcggttccggtatcgaatactggaagcgtattggcgagtattacaacctcaacctgactatcgttaacgatcaggtcgatcaaaccttccgctttatgcaccttgataaagacggcgcgatccgtatggactgctcctccgagtgtgcgatggcgggcctgctggcactgcgtgataagttcgatctggcgtttgctaacgacccggattatgaccgtcacggtatcgtcactccggcaggtttgatgaatccgaaccactacctggcggtggcaatcaattacctgttccagcatcgtccgcagtggggcaaagatgttgccgtcggtaaaacgctggttagttctgcgatgatcgaccgtgtggtcaacgacttgggccgtaaactggtagaagtcccggtaggtttcaaatggtttgtcgatggtctgttcgacggcagcttcggctttggcggcgaagagagtgcaggggcttccttcctgcgtttcgacggcacgccgtggtccaccgacaaagacggcatcatcatgtgtctgctggcggcggaaatcaccgctgtcaccggtaagaacccgcaggaacactacaacgaactggcaaaacgctttggtgcgccgagctacaaccgtttgcaggcagctgcgacttccgcacaaaaagcggcgctgtctaagctgtctccggaaatggtgagcgccagcaccctggcaggtgacccgatcaccgcgcgcctgactgctgctccgggcaacggtgcttctattggcggtctgaaagtgatgactgacaacggctggttcgccgcgcgtccgagtggcacggaagacgcatataagatctactgcgaaagcttcctcggtgaagaacatcgcaagcagattgagaaagaagcggttgagattgttagcgaagttctgaaaaacgcgtaaacacatttaataaaaaaagggcggtcgcaagatcgcccttttttacgtatgacaaacacagaattgcctgatgcgctacgcttatcaggcctacgaggatggtgcaatatattgaatttaagcgattttgtaggccggataaggcgttcacgccgcatccggcaaaaacaacgaacactttgtcaacaaactgagtagctcaaggaaatcccaatgaagaccaacaggagtctggtcgtcatagtgagtctaattaccgccacattactgctgactgcatgcgcccaacctgaacaaagtagtttagctggcgactggttactgacccctaaagataaaaccagaggattaacgggtagcattgcggtaaatattgcacctttccggtgtaagacaaattgccgtggtgataacttacctgataatacccgccgctggcagttgagtggcgggaacgaaaaagaacttacttatcttcataatatgagtgcacaagaaaaggtcggtttaaatcccggttggcaatgctacaccagtttttttatgcgggtttgccagggcaagcccggcactcgaccgatagtcaatgaggattatgtcagcgaaagcggattttttggcagcatgatgcatgtcgggattattgagttacgacgctgccagagtgaaaattgccagcaagaattgaaagcgataaatacacattaaaatagtgagtccgggaatgaaacccggacctgaacatgtcttattgcgtgaatgtttctttcatttgatactgcatttcccagagttcagtaaggctaataacttttcttgttcttgcttcttcactttgtacccataagaaagggtagaacgtgaaggcttccgttgcgcttaattttattacgtcttctcgccattgctgccatcgtacattttcatagaaggtatctaaatcaccggataatgcccactgaagaaactcagaatatccaacttccagactttcccaattcagcgtatctggcgcaaaataataaacgcagccagtatcttccccaagatcgccaccattaagagcaaaaattacccctgcgacatcgtcagcgatgggtaaagcccgcacgcctgcgaattcagggcgttgtgtccaacttactggatctcgtggcaaccgggggtgaccagatcctgctatgcgtaattaaccattatcaatcagcagacctccggagccatagacaagcgcacccatcggactttttgttgtcacctgtaattgataaagtgcggtttcggctaaatctttattaaccggtaagagttcggtatggtttgtggcgtcttttaaccagttctggattattggccaggcactatcttcagtatttactaactgattcatttcacgcatcgctacttgctccttgtgtgctacggtgtcatttatgatgaggaattgtatggaacattttttaaatattaagttccttatatttgaataaaaaatgactttatccatacattgccacttttttcaaagcataaaccgatacccaataccggtttcagtaataaaatggcgaggccgggccggatcctgttccagtttttgtcgcagatgccccatataattacgcaaatagttgctgtgttcgatcgcgtttagaccctacatctgccggatgcggcataaataacgaactatttgccaacaaacagaaagggcgatcattcaatcgcccttttttactttgttttattaaccgtgtttatttttcagttcaaagcgtggacttaccagaccatacagtgtccaaccaaggaaggtcacgatggaaccgtacagcatggcttcttccccggaactgtacagcgcataaaagctatacatcgcgccaacaaaagcaacaaagtttgcaactttcgctttactggggggcacattagcgaccttctgaataatgactaatgccgccatactcagaatatacggaatgatattggtcaccacggccaggttaaccagcacgttgaactgactgtttaggctcgggctaatggtcatcagtgccaatccactctgaataatcacaatggtcaacattccctgcaccggtgcatccactttggttacacgggagaaaattttagggaagtagccttcatcagaactagatttaaacacctgggcaatggtgaactgccagccaagtaggctaccgcagcaggacatcaccatcagcgccataatgactttacccacttccggcgtgaacatctgcgcgaaggccagaccaaatggtgccgtactatttgccagctccatatttggcacaatcccggcaatcacgttggtggagacgatataaatcaccgccgcacctaacgtaccgccgagtaccgcgattggcacattacgttccgggttttccactacatcagtattcgcacacgcagactccagaccaagaaaagcccacagcgtcatagcgatggaagaacctaccgcactgaagaacggtgcatgatgcggattccaggaatcaacgtacagcgtcgggctaaaccagaaccagccaataatgcacagaccgacgaccggaataatgaccccccacacggtaatgctactgatttgcccggtaatgcgcgcaccaccaaagttagccacggtacaaatccacagcaccccgatggtcgcaagaccaatctgcactgggctcaaactcgcgccgagcagttcggtgccgtaaccaaccgcgctaatagcaatcgcgacgttagcaatcagcagactgacgccgtaggtatagttcgccataaagttaccggatttaccgaaagcatactcggcataaccgcccataccgccacttttacggctgaacataccgcattttgcgaatgcccatgccagtgccatactgcctacggctgtcaccagccaggagataatactgattgtcccgacttcggcaagctttgtcggcagcatgatgataccggagcccatcatgttgaccatcgtcagtatggttaactgaacgacgcccattttgttgcttttagcctgactcataatttttcccctttcaacagggtgctttgcgcatcacgaggcttgatgacatagcaccaaacttgcttacgaccatcatgttcttcgatatagacaccctgcagctccggtgcaaaacctggcagcaggttgatcccttcttccagagcgctgaagtaacgcagaacagcaccaccccagatttcacccggaacaacacacagcacacccggaggataaggaagcgcaccttcggcagcgatacggccttctgcatccggcagacgaaccagttccacttcaccgcgtaaataggcgtagttggcttcttgcggattcatgctgacgcgtgggaagtgctccttacggaacatctctttttgcagttgtttcacgttgtggcgggcatacaaatcatgcatttcctgacacaactgacgcagggtataaccggcgtagcgctcttcatgctgtttgtagatggaaggtagcacttctgctaatggcgcgtcggactcaagcagtttttcgaagcgtaccagcagggcaacaagttgctgaagtttggccatatcttctgccggagtcagcaggaagaggatggagttaagatcgcatttttccggcactacgccattttcgcgcaggaagttagcaagaatcgtcgcgggtacaccgaacgcttcatattcgccgttacgtgcatcaatacctggggttgtcagcaacagtttgcatggatcgacaaagtattgattctctgcatagccttcaaaagaatgccagtgttcccctggtacaaactggaagaagcgcagatcaaccgcaatttgcgctgtttcatagctctgccagggtttaccatccaccagttcaggtacgaacggacgaatatgctgacagttatcgaggatcagtttgcgggcattaatgccatttaccacacaatccatccacatattacgaccgctgacaccttcatgcattttggcgttgatattcagtgcggcaaacagcggatagaacgggctggtggaggcgtgcatcataaaggcgttgttcatgcgtttgtgcggtacataacgctgttgccctttgatgtggctgtcttttttatgaatttgactagtctgagaaaaaccagcctgttgtttatgcacagattgcgtaaccagaatacccggatcgttctcattaagatccagcaacagcgggctacagtccgccatcatcggaataaactgttcatagccgacccatgcactgtcaaacaggatgtagtcacacagatgaccaattttatccaccacttggcgggcgttataaatcgtaccgtcgtaggtgcctaactgaatcacagcgaggcggaaaggacgagcctcttttgcccgctgcggtgcgacttccgcgatcagctcacgcaggtaactttcttcaaaacagtgcgcatcaatgccaccgataaagccatacgggttacgtgccgtttccagataaaccggtgttgcaccagcctgtagcaacgctccgtggtggttagatttgtggttattgcgatcaaacagcaccagatcacccggtgttagcagggcgtttaaaaccactttgttagaagaactagtgccatttaaaacgaagtaggttttatcggcattaaacacttttgccgcatgttgctgtgcaatgcatggcgcgccttcgtgaatcagcagatcgcccatcgctacgtcggcgttgcacaagtcggcacggaacagcgcctcaccaaagtattccacaaactgattccccgccggatggcgacggaaaaattcgccgccctgatgaccagggcaatcaaacgcgctgttaccttgattgacataatcgaccagtgcgcggaagaaaggtgggcgcagttgagtttcataatggctggcagcggtttctaactggcgaccataaaattctcgtcggctttcgcaattctcaaagacaccgctaatacggggcaaatactctgcgggtacacgttcttgattttcagtagcaataaataccgggatgccataacccgtggcatcgatttcatcgagttttccgcatgtaacatcgttgaggcttaaaactattgccgccacatcgatattacgactttcattaatgtagatacattctcgctgcgtggtaaaacagtccgggcaagaatcactaaccgcaatttttaatttactcatttttcatctctttattttaggtaatagcaggtcctcaatttctcgaatgagaaatcgatcgtgccggaaaaaagcaaagttaccccgctgataaataaatcaggtagattgcttttttcagaatgcagaaacccttaccagtcaggtggctgataatacaagggttaacagagaatgagcactgcggaatacaggcatatgcctgtaatacagagagtcaggaagacctgtacgctgaagtgcccttagtcggtagactaacgggcattgaagaagtgaaagtcgaagctattgcgatgagcaaacttcataatatgagttgtccgccttatatggggcatagtgcggctgttattttccatttaatttacctttcctgatgtgaatgaaggtgaagatattctatccaggaaatacggttgaactgtgaaggtgatcaataaaaaatgatcaatcttaatttatttaatgatgagctttttactcagtaatataaaatattgaattgttatttttgtgtgttgtttaagataaaaagccgtatttattattacggctttaattaataaaaggcaggctgtattaaaattaatattcaaagcataaaccgatagccaataccggtttcagtaatgaaatggcgtgggcgggcgggatcctgttccagtttttgtcgcagatgtcccatataaatacgcaaatagtgactgtgttcgaccgcgtttggcccccacacctggttaaggagctggcgctgggtgagtacttttccggcattgttgagcagcaccgccagcaggcggaactcaattggtgtgagatgcacctcttcctcaccccggtgaatcacgcgggcggctaaatcgacggtaacatcggaaaattttaccagcggatcgggcgcggtggtggcagagtggcggcgtaatgcgacgcgcagacgggcctgcaattcgccaatgccaaacggcttactcagataatcatccgctccggcatccagcgcggcgattttgtcgctctcttcgctgcgtgcggaaagcacaatcaccggcaccgcgctccactggcgcaggtcgcggataaactcaatcccatcaccatcgggcaggccgagatcgagaataatcaaatctggcttacgggttgccgcttccagcaagccgcgttgcagcgtttcggcctcaaagacgcgcatcccgtcgccctccagcgccgtgcgcagaaagcgacgaatagcctgttcatcttcaacaatcagaacgtttgtcacatatcctcatgaaattcttcaagttcaggggcagtttgctggggaagtgtaacacgaaaacaggcaccaccttccggtcggttgaacgcggtaatagtgcccccgtgtacatccactatcgcccgacaaattgccagtccaagccctacccccggtactgcgctctctttattcccgcgagcaaacttatcaaatatcgtctgctcctggcctggcggaagaccggggccgttatcccagacatccagttgtagattttcgccctcaacgtgggcatcgataccaatttcggcctgcgcacccgcatatttcaccgcgttctccagcagattaatcagcacccgttcaaagagtggcccgtcaacgtggattaaggtcagcggttctggcagagaaagattgatggggctgcttaaacccggttccagcatttgcagcgcgctgccgactacttcttccagcgttaaccactctttcttcaaattaaagccgccggactgaattcgcgccatatccagtagattattcaccagtcgggtagtgttcagcacatgctgacggatctcgctggcctggcgggcgtggggacttccttcgcttgccagatcgagcgttaagatttctgcctgaccaaacagcaccgtaagcggcgtgcgtaaatcatggctaagcgccgccagcagggcgttgcggatctgttcacgttcgcttgccatccgcgcctgttcttcgctggcggttagcgtcagccgctcaagggcattggcgactaacagcgtaaacgtctccagcaggcgctgctgttccgggatcatcaactggcgcagattccccggctccaccaccaccagcccgtaggttttctcgccgctttttagcggcaaaatctggtacggtacaccgggtaacgtgtcggtgcccgcgcccgcaggcaggcctttatcaaaactccactgcgcgatggcatcgtcccacggcgtcattccttgcggatgtgttaacggctgcaatttaccgttgtcatcgggcaacaacacctgactgcgggcatgaaacgtggaggcaataaattgttcgctggtggcagcgatatcctgcggactgcggcccaccgccagagctttgctcatttcatataagtgccgtgtgcgttgctcgcggtaacgggctacccgcgcctgataacgcacgccagcagtaaggttcccgatcaccagcccgacggttaacatcaccgcgaaggtcagcagatattgcacatcagagacggcgagcgtgccgcgtggggcgataaaaaagagatcgaaactcactacattaatgacggtggcaaccacactaggccagcgtccataaaatagcgccaccaccaccacgccaagcagatacagcatcaccaggttggcggcatcaaacgccatcagccactgcatggcaattaaggtgataacggcgcataacgcggcggcaaccacgcatccctgaatttgtacacgccacttgtctttaaaagagcggttatccggcgcgttgttaatcgtgcgggcgggtggttcatcaagcgcgaccagcacctgatcgagatcgggggcgatgcgcgccagtcggtcagcaaacgtttcccgacgccaccagcggcggctggccgggcgaccgagaataatcttgccgagattatgttcacgggcataacgcactaccgctttctcttccgctggatcagaaagtgttgccgtctccgcgcccagttcctgcgccagacgtaaggcgctgagaattgcccgacgttttttttccggtaagcggtgcagggcaggggtttcaacatacaccgcgtgccagacgctacccagccgactcgccagccgcgccgctgcgcggaccagtttttcgctgccggtgttatggccgatgcataaaaggatcgcgtcgcgcgtgcgccacactttctcttcgccaggatgcccccgccaggcgcgcatttgctcatcaacgcgatcggcagtacggcgcagtgccagttcgcgcagggcgatcagattacctttgcggaaaaaatgttcaatggcgcgctccgcctgcccggcaatatagactttgccttctttcagccgctggcgcagatcgtccgggggcaagtccaccagcaccacgtcgtcggcggcatcgaaaaaaggatcgggcacggtttcccgtacctgaattccggtgacgccgctgaccacatcattcagactttccagatgctgaacgttgacggtagtgaaaacatcaatgccagcttccagcagttcttcgatatcctgccagcgtttgggatgacgggaacctggcgcattactgtgcgccagttcgtccattaagatcagcgccgggcggcgggcgagggcggcatcgagatcaaactcgctgatatgccgcccacggtacgcctggcgttttaacggcagaacagccagcccttccagcatggcggcggtatcttttcgcccgtgggtttctaccacgccaaccacaatatccagcccttgcgcccgcagtcgctgggcttctgccagcatcgcccaggtcttcccgacgcctgcacaggcaccgaagaaaactttcagcttcccccgatgcggcgcggcagtttgttccagcagacgatcggggtcgggacgtaagggttcgttattcatcaagtttatccagcgccagattgagttcaacaatgttgacaaccggctggccgatatatttcaccagcggttgttggctgtattttgcgatcagttgcgtgagctgttcaacgctgagattacgcgctttcgccacgcgtgggatttgccaggccgccgcttgcggggtgatattattgtccagcccgcttgcgcttgccgtcaccagttcaaccggaacgctcgcgctggcatccgggttagcggcccgtaatgcagcaacgcgtgcggctattagtttatccagctcagggttactgaccgccagattgctcccgccagaagcctgtggattatagggcatttctgccgttgcgctcgggcgaccatgaaaatagccgttgccggtaaaattctgcccgattaatgcgctaccgcgcaccgtatcaccttcacgaatcaagctaccattggcctgccagggaaaccaccattgccccagtacggtggtcagcagcgggtaaacgccgccagtaatcaataacagaaagataaatgtacttaatgccggacgtaatccactcatggtaaacctcacaccagaccgcaaacggtcagcagtaaatcaatgactttgataccgataaacggcaccagcagcccacccagaccgtaaatccataagttacggcgcaacatggcagaagcggtaagcggtttataactcacgccttttaacgccaggggaatcaaaaagacgataatcaaggcgttgaaaatcaccgcactgaggattgcggagtcggggctatgcaggcacatgatgttcagcgcatttaactgcggatacgttgccgcgaatgccgccggaataatggcgaagtatttcgccacatcgttggcaatgctgaaggtggtcaggctgccacgggtcatcagcatctgtttgccaatgtgcaccacctcgatcaacttggtcgggttagagtcgagatcgaccatattgcccgcctctttcgccgcctgggtgccggagttcatcgccaccgcgacatctgcctgcgccagcgccggagcatcgttggtgccgtcgccggtcatcgctaccaaacgaccttccgcctgatactgacggatcaatgccagcttggcctccggtgtcgcttcggcgagaaaatcatcgacacccgcttccgcagcaatcgcggcggcagtcagacggttatcgccggtaatcatcaccgttttaatgcccattttgcgcagctgggcgaagcgctctttaataccgcctttgacgatatctttcagcgcaataacgcccagcacacgagaaccttccaccaccaccagcggcgtggctccctgacgcgcaacctgatcgactttttgatcaacatcggtagggaagtgaccaccgttagcctcaacatggcgacgaatggcatcgacagaacctttacggatcatgcggttgtcgatgttgatcccgctcatccggctttgcgcagtaaacggtacaaaggtggcatggaggctctgcacatcgcgctcgcgcaggttaaaacgctgcttggcgaggatcacaatactgcggccttccggcgtttcatcagccaggctagccagttgtgcggcgtcagccagcgttttttcatccacgccctgcgcggggataaactcgctcgcctgacggttaccgagtgtgatggtgccggttttatccagtagcagaacgtcaacgtcacctgccgcttcaactgcacgtccgctggtggcaatcacattcgcgcctagcatccggctcatcccggcgacgccgatcgcactcaacaggccgccaatagtggttgggatcagacagaccagcagcgccaccagtaccgttacgctgactgcattaccgccccacgcggaaaacggccacagcgtggcggttgccagtaaaaagacgatagtcagggcaatcagcagaatggtcagggcaatttcgttcggcgttttgcgtcgctgtgcgccttccaccatcgcgatcatccgatccagaaatgtctcgccggggttaacgctacactcaatcaccagccagtcagaaagaatacgcgtgccgccggtgacggaggcaaaatcgccgccggattcacggatcaccggtgcgctttccccggtgatggcgctttcatcgacgcttgcacccccttcaataacttcaccatcgcaggggataatatcgccagcttctaccagtacgatatcgcctttacgaagttggtcggcaggaactttgtccgccgcagcgccatatttcggctcacgcagcttgcgggcaaaggcagtttttttcacccctttcagactgttggcctgcgctttactgcggccttctgccagcgcctcggcgaaattagcgaacagtacggtgatccacagccaaccgctaatggccgcgctaaacagcgcattgccgggcatcgcaccgcttgccatcgcgatgctaatacaggtggtcagcagactgccgatccagacgataaacatcaccggattgcgccattgcgcctgcgggtttaattttttcaccgcttctttcagcgcctgaacgacaagtgttggttcgaatagcgccagttgtttacgactcatattcagtgctcactcaatatcatcaggagagatattccgccaccggaccaagcgccagggcagggataaaggtcagtgcgccaaccagcaacacggtgccgattaacaggccaacaaacagcgggccgtgcgttggcagcgtgccggagctggcggcttggctctttttactcaccaggctaccggcaattgccatcaccgggataatcaccccgaagcgaccgacaaacatgcagaacgccagtaaacagttccagaacggagagttggcgcttaatccggcaaaggcgctgccgttgttgttagcggcggaactcacggcgtacagcacttcgctaaaaccatgcgggccagggttgagcatggcgctacgtccggcgtcggtcatcatcgccaacgccgcgcccatcagcaccagcgtcggggtaaccagaattgccagtgcagtcagtttcatctcgcgtacgtcgatttttttacccagatattccggtgtacgaccaatcatcagcccggcaataaacaccgccagcaggacaaacagcatcatgccgtaaagaccagaaccgacaccgccgaacaccacttcaccaatttgcatcagccacatcggcaccatgccaccgagagcggtaaagctatcatgcatcgcaatcaccgcgccacaggaagccgccgtcgtcacgaccgcaaacaggctactgaccagcacgccgaaacggctctctttaccttccatattgatgctgctgtccgtgcccagtgccagcagatgaggattaccctgaacttctgcccacatcaccacgcctacgcagatgacaaaaatcacactcatcgcccacagcaacatgcgcccctggcggcgatcgcccatcacttcaccaaaggcaaagcacagcgccgttgggatcaagaagatcgccagcatctgcacgaagttggtcagtgcggttgggttttcaaacggatggctgctgttggcattaaagaagccaccgccgttagtaccgagcatcttgatcgcttcctgagaagctacaggccccatgggtaacagctgttgcgctccttcaacggtattcacagcctgataaggcagaaagttttgcagcgcaccttgttgaataaaaaacagtgcaatcaacaacgccacagggactagcacccataacgtgatgcgtagcagatcgacccaggcattcccgagcgtgctcatgctctggcgggtaaacgcacggatgagggcaaaaatcaccgcaatcccgctggcggcagaaagaaagttttgcaccgttaagcccgccatctggctgaaatagctcaacgtggtttcaccgctataagattgccagttggtattggtgacaaagctgacggcggtattcagcgccagatcccagctcagccctggcaactgctgtggattaagcggcagatagtgctgaccgagcaacataaaaaacagcaccgccagccccagcatgttcaggccgagaatggcacaaagatattgcttccagttcatctcacggtcagagacgccaagtgcgcgaaaaagtacgcgctcaacgcccgttgtaccgggaagaggaatgtcattaatcagccgcgccagcccgctgcctaaaggacgcgccagcaccattaacaccagtaaaaacgtggcgatcagtaagaacccttgcgcagccatcagaacgcctccgcattgatcagggcataaaccagataacccagtaataaaaacaccagcaatacgccggttatcacgcctgcactcacagtgcacctccagtggcctaaaagtgataccggaagggtagaattctggctgcaaagatttcgcaaaaatctgcgggcggggtgtaaaaaaagtataaaaatggcaaaagccatgatttaactaatgtttagtattaatttaacttttgtgtaacttaattacaggatgaatgtaaataaaccatcaataagcaaaaataagtggtcggatgagtagtaaaattacacaaaaggcggtactattttcatcagataaacaaattcatttttccggtgccattcaccgggtagatacaaaagggggagaaaagtatggaactctacagagaatatcctgcatggcttatctttttacgccgtacttatgcggttgcagcgggcgttctggcgctgcctttcatgcttttctggaaagaccgcgcccgcttttacagctacctgcatcgcgtctggagcaaaaccagcgataaaccggtgtggatggatcaggccgaaaaggcaactggtgatttttattgattgctgagttttgaatacattgaacgtctacacttactcctgtaaaccgctcaggagcagtaatgaatctacaacgatttgatgacagcaccctaatccgtatctttgcccttcatgagttacatcgactgaaagaacatggcttaacgcgcggggcgcttctcgattatcacagccgctataaactcgtctttctggcgcattctcagccggagtaccgcaaacttggcccgttcgtggctgatattcaccagtggcaaaatctggatgactattacaaccagtaccgccaacgcgtagttgttttgctttctcaccccgccaacccgcgcgatcacaccaatgttttgatgcacgttcagggttattttcgcccgcatattgattccacagaacgccagcagctggctgcgcttatcgacagttatcgccgtggcgagcaaccacttcttgcgccgctgatgcgtatcaaacactatatggcgctttatcctgacgcctggcttagtgggcagcgttatttcgaactttggccgcgtgtgattaacttgcgccatagtggagttttatgactacccatctggtctggtttcgccaggatttacgtctgcacgataatctcgcactggctgccgcctgccgcaatagctctgcacgcgtgctggcgttgtatatcgctacaccacgccagtgggcgacgcataacatgagcccgcgtcaggctgaacttatcaatgctcaactgaatgggctacaaatagcgcttgcggaaaaaggtattcctttattgttccgtgaagtggatgactttgtcgccagtgtcgaaatagttaaacaggtgtgcgcggaaaacagcgttacccacctgttttataactatcagtatgaagtgaatgagcgggcgcgggatgtggaagttgaaagagcgctgcgtaacgtggtgtgtgaaggatttgatgacagcgtgatcctgccgcctggcgcggtgatgaccggtaatcacgagatgtacaaagtctttacgccttttaagaatgcctggctgaaacggctgcgggaagggatgccggagtgcgtcgctgcgccaaaagttcgtagtagcggaagcatagagcccagcccatccattacgctgaattatcctcgtcagtctttcgatactgcgcattttccggtggaagaaaaagcggcgattgcgcaattacgccagttttgccagaacggtgccggagaatatgagcaacaacgagattttccggcagtggaaggcaccagccgtttgagcgccagcctggcaacgggcgggttaagccctcgccagtgcttgcatcgcttgttggctgaacagccgcaggcgctggacggtggggccggtagtgtctggcttaatgagctgatctggcgcgagttttaccgtcacctgataacgtatcaccccagcttgtgtaaacatcgtccatttattgcctggacggatcgtgtacagtggcagagcaatcccgcacatttacaggcctggcaggaaggcaaaacgggatacccgattgttgatgccgctatgcgtcagcttaacagcactggctggatgcataacaggctacggatgattacagccagttttctggtgaaagatttattgatcgactggcgcgaaggcgagcgatatttcatgagccagctgattgatggtgatttggcagccaataacggtggctggcagtgggccgctagtaccggaaccgatgcagcgccgtattttcgtattttcaacccgacaacccagggcgagaaatttgatcatgagggcgagtttatccgccagtggctaccggaactgcgcgatgtgccagggaaagtggtgcatgagccgtggaagtgggcgcagaaagcaggtgtgacgctggattatccgcaaccgatagtcgagcacaaagaagcgagagtacaaacgttggcagcgtatgaggcggcgcggaaggggaaataacagacgcgtcaggcaatcgagcccagatgccggatgcggcgtgaacgccttatccagcctacaaatttgtgcaaattcaataaattgcaggaaatacgtaggcctgataagacgcgtcaagcgtcgcatcaggcatcggtgctggcctattaagactccagcgccagcgcgcggtttctgaatttcagcgcctgatacagccaaatcatcagtaccagtcctacacacgccagtgcgccccaggtaatttgatcaaatacttcaatatatgcattgatggagtagttgatcgccccggaagcatcaaagctagcctggcttgtctgatcggcaatcacgcccgccagatagttcgcgatcgcgccagaaagcagcatgtagatgccggttaatacgccggtcacaccggggatttcaatgcgcgtaatttggctcatggcaaccgggtcgataaacagttccgcaaagcccatcaccgccaggcctaataccatcagtggcagagaagagtgaccatacattgcggaccagcgggcgcttaaggtcagaatgcagaatccggcgctcatcaggccaaggccaagagcaaatttcccccagatgcgcacggtacgattacccgcgacactctcttttaccacccacgccaggaacacaccgcacagcataactgcgaaggcattaatgctctggaacatcgcggtcggaacggtataaccaaacatatcgcggttaacgaagcggtcgatataaaggctaatgctgctaccgccctgttgtgcgaaggcccagaacaacatactgaagaaggtgagcgtcacaatcagccccagctccttccgctgtttctggttttctgctttgcgataaatttttgccagtacacccaggccaataatagtcgcgacaattaaggcgtatacgctccactctttccagaacagtatggtaatcagtgcaggcgttgccaccagcagaaccagcagccatccccagttcggcaggagaaagtttgtcgcacgcagtacttttttgttaacgccgcgggtatgagtgaaatgacgattgccacataagaaaatgaccagacccgcgatcatgccaaccgccgccaggccaaagcccatcgcccagctgtactcttcctgggcgtaaccacaggcgataggtgcgataatagaccccacgttacccgccgcatacatcaggctgaaaccgccatcacgacgcggatcggttggctcatacagctcgccgagcagacagcttacgttagatttaaacaggccatagccgcagacgataatcgccagggacagatagaggaaactcggatggatctcactggcacccagcaccacatgaccgatcgccatcaacaacgcccccagcatcaccgccatgcgattgccgagaactttatccgccaaaaagccaccgaggattggcgtgacatacaccaggctacagtaggcgctaaataactcgtaggcgtgagtatcgttgtattttagttgattggtgagatagagaatcagcagggcacgcatgccgtaaaagctaaaatattcccagatttgcagcgcaacgacatagtaaatagcgcgcggctgacttgcgtgtttattcataataattccacaattgacggcaacgtcacgtaatagttgcgcggcgtgcttgtgtttccttaaagttaaaactttgatacagatctgattatttatgcaatatgctgtctgattgcataaatatacattagctgaagcgtgatgatataaacaatttgcgtcttttggcgtcgggtttgtttcttaatatgtcaaaagattggctatcgacgaactggcgaggtaacgctatgttaacggtgtagctatcagaatacggaaggcgcgaagatgaaaaacaccgaactggaacaactgattaacgaaaaactgaacagcgcggcgattagtgattacgcgccgaatggtttgcaggtggaaggcaaagagacggtgcaaaaaattgttaccggtgtcaccgccagccaggctttgctcgatgaggcagtgcgtctgggcgcggatgcggtcattgtgcatcatggctacttctggaaaggagagtctccggtcattcgcggaatgaagcgtaaccgtttaaaaacgttgctggcgaatgatatcaacctgtatggctggcatttgccgcttgacgcacatcctgagctgggcaataacgcacagctggcggcgttactggggatcacggtcatgggcgaaattgagccgttggtgccgtggggcgaactgaccatgcctgtgccgggactggagctggcttcctggattgaagcgcgtctgggacgtaagccgttatggtgtggcgataccggacctgaggtggtccagcgcgtcgcctggtgcacgggcggcgggcaaagttttatcgatagcgccgcgcgttttggcgtggatgcttttattactggcgaagtttctgaacagaccattcatagtgcccgcgagcagggattgcatttttatgctgcaggtcaccatgccactgaacgtggtggtattcgcgcattgagcgagtggctgaatgaaaataccgatcttgatgtgacctttattgatattcctaatcctgcataacgaataatcagagggatcgaaagtgcaacgagcgcgttgttatctgataggtgaaacggcggtagtgctggaactggaaccgccggtgacgctggctagccagaaacggatctggcgactggcgcagcgtctggtggatatgccgaatgtggttgaagccattcccggcatgaacaatatcacggtgattttgcgtaatcctgagagcctggcgctggatgccatagagcgtttgcaacgctggtgggaggagagcgaggcgctggagccggagtctcgctttattgaaattccggtggtttacggtggtgcaggcggaccggatttggcggtggtcgcggcgcattgcgggttgagcgaaaaacaggttgttgaattgcactcctccgtggaatacgtggtctggtttttaggttttcaaccgggcttcccgtatctcgggagtttgccggaacaactacacacgccacggcgcgctgaaccgcgcttactcgttccggcaggttctgtcgggatcggcgggccgcagactggtgtttatccgctggcaacgccgggtggctggcagttgattggtcataccagtctcagcctgtttgatccggcgcgtgacgaacccatcttattacgtccgggagacagcgtgcgctttgtaccgcagaaggagggagtatgctgaagattattcgtgcgggcatgtataccactgtgcaggatggcggtcgtcacggttttcgccagagcggtatcagccactgcggcgcactggatatgcccgcgttacgcattgctaacctactggtgggtaatgacgccaatgcccccgcgctggagatcacgctcggtcagttaactgttgagttcgaaactgatgggtggtttgctctgacgggtgccggttgcgaagcgcggctggatgataatgccgtctggaccggctggcgattgccgatgaaagcaggccagcgtttaacgcttaaacgcccgcagcacgggatgcgcagttatctggcggtcgcgggtggtattgatgttccgccggtaatgggcagttgcagcaccgatctcaaagtggggattggcgggctggaaggccgtttactgaaggatggtgaccgactcccgattggcaaaagcaagcgtgattctatggaagcgcagggcgttaaacagctgctgtggggcaaccgcattcgcgccttgccggggccggaatatcatgagttcgatcgcgccagccaggatgcattctggcgtagcccctggcagcttagcagccaaagtaaccgcatgggctatcgcttacaggggcaaattttaaaacgcaccaccgatcgcgaactgttatctcacggtttgttaccgggcgtggtgcaggtgccacataacgggcagccgattgtgttgatgaacgacgcacagaccaccggtggttacccgcgtattgcctgtatcattgaggctgatatgtaccatctggcgcaaattccgctcggtcagccgattcattttgtccagtgtagtctggaagaggcactaaaagcacggcaagatcagcaacgttattttgaacaattagcgtggcggctgcacaatgaaaattgacctgaacgccgatctgggcgaaggctgcgccagcgacgcagagctattaacgctggtttcctctgccaatattgcctgtggatttcatgcaggcgatgcgcaaatcatgcaggcttgcgtgcgtgaagcaataaaaaatggtgtcgcgattggcgctcacccgagttttcccgacagggaaaattttggtcgcagcgccatgcagctgccgccagaaaccgtttacgcccagacgctgtatcaaattggcgcgctggcaacgattgcccgtgcgcaaggcggcgtaatgcgtcatgtcaaaccgcacggcatgttgtacaaccaggcggcgaaagaagcacaactggcagacgccatcgccagagcggtatacgcttgcgatccagcattgattctcgtcgggctggcgggaagcgagctgattcgtgcaggcaagcaatatggtctgacaacgcgcgaggaagtgtttgccgatcgcggttatcaggctgacggcagcctggtgccgcgaagccagagtggcgcgttgattgaaaacgaagaacaggcgctggcgcaaacgctggagatggtgcaacacggcagagtcaaaagtatcaccggcgaatgggcaacggtcgcggcgcaaacggtctgcctgcatggcgacggcgagcacgcactggcgttcgcccgccgactacgctctgcatttgccgaaaaggggattgttgtcgcagcataaccccgattaataaagaatgaaaaaaggatatcaccatgcctgaaggcccggagatccgccgtgcagcggataacctggaggcggcgatcaaaggcaaaccactaactgatgtctggtttgccttcccgcagttaaaaccttatcaaagtcaacttatcggtcaacacgttacccatgtggaaacgcgtggtaaggcgttgttaactcatttttccaacgacttaacgctctacagccataatcagctttacggcgtctggcgcgtggttgataccggcgaagagccgcagaccacgcgagtattgcgggtaaaactgcaaacggctgacaaaaccattctgctttatagcgccagcgatattgagatgttgaccccggaacaactgaccacgcatccgtttttacaacgcgttggtcccgatgtgctggatccgaatctgacgccggaggtggtgaaagaacgattattgagcccgcgctttcgtaaccgtcagtttgctggattactgctcgatcaggcgtttctggctgggcttggcaattatttgcgggtggagatcctctggcaggttgggttgactggaaatcataaagcgaaagatctcaatgcggcgcaactggatgcactcgcacacgcgttactggagattcctcgattttcctacgctacgcgggggcaggtggatgagaataagcatcatggggcgctgtttcgctttaaggtttttcatcgagatggcgaaccgtgcgaacgttgtggcagcatcattgagaaaaccacgctgagttctcgcccgttttactggtgccctggctgccagcattaagcgctccgcttcggcgcataggtactaataaaccgcgcaatggcaggccctgtcagcaaaatactgaacaggcgtagggtttgcatcgccataatgagcgccatatcggcattgctccctgcggcgatgaccgccacggtatcaagcccgccggggctggtggcgaggtaggcagtcataaaatcaatgtgcataaaccgggtcagcccccacgccatacccgcacaaatagccagcagagcaaaaatgctcagcaggatttgcggtagcgggcgtagtgcccgcagtaagatttgtttatcgaaaccaagaccaatccgccagccaattgccatatacgccatcgccagcagccattccggtagttcgatggtgatgagctgaccagactggagcactgcgcccgccagcatcgggatgagcatcgtgccggaaggaagacgcagcaggcatcccactgtaccggcaacgaccgcgagcaaaatagtaagcaggagattaatgctcactggcgggaaccagacgatatgctggttaaccgcttcagcgttatcgcccagcatcatgcgggtgaccagaacagcggcccccgcgacgaacagcactcgcagatattgcataaacgccaccaggcgaatatctgcgccgtaatcttgcgccatagcgaccattgccgccgcgccgccaggagaggagccccaggcaccggtatttccaggcaaactgctatagcgcaccaataaccaacccacaatggcgctggaaagcagcgttaccagtaaaattgcaagcacgatcggccagttgacggccagggtggtgagaatgctaccagtgaggttttgcgcaatcatgcagccaagaatggcctgggcggcgagaaaagcagagcggggaagttgcagagtaattccgcgcatactaaagatgatcccggcgatcatcggcccaagtaatagcgccgccgggagatgtaccgcgaggaaaccaatagaaaggagaagacttagcacacataacattccccactgcaaaactggcatccttcgctccctcattattttctctttggtgtatcgatacagcataaagaaagctgggccaggaaaaaataacagcaatcaaggaaaaggggaaaatcagcaattttctgaaagagatgccctttccggcggcaaagggcatcatggtaaatcagttatagttaatcttaaaaagcaccactgtatcgaaggggccagcctcgatgggggtgcctggaatggagctaagttcagccgtataggttttttcgtagaccaacatgtcactggtgaaatcggcgtattcagcatatttattgaaggtataagggctggcgttttcatccagtaaacgtagcttcagaccattaccaatcaacaatgctttatcttcttcaaccaacgtttcttcggtataaaaggaggaactgactttaaatccgtcggtgcattgatcgttttggctcttggtcgttttaatactgaacgttttgctcattgtgtggcgacgtatatccagcaaattaaatttaccaaaatcaatcacctgtgtttccggactaatggaaaaattgacgctgcaatccagcacgcgaatgttttccagaccagtaatatgatatttcaggttttgggcagtagggtcttcgttaacgctaccggcaccgtcaaattgcacgacgatatagtcgctaagcgtactttgataatcatgcggcggcatttctcgtattttgacgtataaccgcatgcgagcgagaaaggtacggctcatatgaatattagcgggatcgccgctgcaaattttgttctgccatcccatcgcgatgatctgctcaggggtataaatatcaatgttcttactgtcgatacactggttagtgtcgatgcgactttttcccagactggcatcgtaatcgacaccgttgtatgtcacgccgagttgataataacgatcctgcacccccggataggggtttacccaggcgtagacatgctcgctttcaaagttgccgttggtattgttgtcacaatagacgggaattttaatatcgtcagattcccagatcttatcaccgggtttggcattgcctggtacagcaaacggttgaatcgcttcacttttttctactgcgccaccagatgtaccaaaatagcagttcagcgccattgcagacttcaacggcagaaataacaggcagatgacgagcaacaatcccttgccagcactcatttcgcctccactgcttgtaaacggcattgtccgctgcagttgagcgtcgtcatgcgtaatgcgccgtaatcatccatgtaaccgagataaaactggctgccgctataacttccggtgtttgtgttgaccgtactaaaaggtgcaaccatcacggttttgaagcctgggagaacgcctttttcatttctccccagataggcaatggtcagataatacgcggtaggatttttcagtgtcagttggttgccctgctggctgacctgtaactgcagttcgaccttttctcctgctttcttgcgtaatgcagccggtcgccagaacaatttaatacgactttgaatagcgacctgaagtatcgcatggtcgctgcttttatccggagcgggaggaatttcgcgcatattgtagaaaaatagcgtttcgcgatcgccaggtaattgtgtggtactggcttgtttcacaacccgcacctggcttgtcgctttcggttccagacgttgaatagggggcaaagcgaccagaagagcatcgcttttctcccctttttcattttctatccaggaataagcaagataaggcagtttgtcactttggttttcgatacgcaggctggtggctttgtcattggcgttaaacacaatgcgtgtgcgatcgggttgcaccgcagcattgcaacccaagctgatggttaacaacattaagggtaatcctttaataaatgtcattctcttttccttaattaatgacaaggtaaaatcaggcgtttggtcgtgtcttccagacgttctggcagatgaataatgcagctttgctcaccccagaccacggtaaacagttgattttcagcgacaccgcttaaccaggcatgtccttcctcgccaaccatacccacgctaatgccgctgtcatcctggcggatatccgcaccgaggggagggaactgaccgctggcgttgcgtatgatgacgttaacgtctttaccggaacgggaagccagacttttgtaacctatcgcgccttcaatccatgtttccttgatgacgttttctgcaactgttacgccgtcgggtaagtcattcatgttcaccgccacggtggaaggctggtaactggaaatcaacggcaccaccgcaatgccaaaatggttggtgtagtcgagattgccctgaaccggaatatctgccacgccatcggtgctgaccatcaggcgtggttcattggtggagctgcggcgatgaaatgctgcaccatattgggttgcggtgaaagaaccgctccagctgctgctgacggaactgtaatcactggcggcataggtaccagaaatatcccactcacccgcactactcaggtgctgatagttaccgctcacctgggctccattgtccggacgatcggattgcagtccggcagacatgccccagctattacgttcatccagcgtatcgttccagctcatgcggtgtatggtgctgtggctactgttttgcatgtcatagccaacccgaccaccgttaccgaaggggaggctaatgctcagataaatctggttgtcgcgatctttatcttcgtagtgggtcgtattgaaactcgtgctaatgctgatatctctccagtcaccaatatcaacattaaaacctgctgtgatgttggcggtcgtggaggcgtctgcattccaccaggtttgatgtagcaggttggcgtaaagattgaggtttagtggggtaatcggttggcccacggataagctgatcgtctgtttttcgtcctgcgcatcgctgtcgttgtatttgtgatccagatagttggcgtagctgtgaaaatgacgatcactgaagcgataagcggcgaggctaatcgtgctgttggtggcatccacttgtttgctgtaattaaaacggtagcttaagccccgctcgtcctgctgagtatcaaaatggctactggcccaggtgacatcaaaggacagtgcgccaagccacagcatattttgcccgatacccattgcggcagaatggtagtcatcatcagaaatcagcaggccgccgtacaggctggtgttactgagcatcccccaggaaacttcattgctaaaaaaggtttcattttcagtttgatgactcatggaaggccgtggctgacccgcggccaatttatagcgaacctgtccctggcgagtcaggaagggcgtgcttgctgcgctaacctggaaattgttcacccgaccatcttcttccgtcactttgacatccagcgtgccctgaacagactgattgaggtcatcaataataaacgggcctggcgggacttttttctggtaaatgacgcggccactttgactgatcgtcaccgtggcattggtctgtgcaataccgctaatttgtggggcgtagccacgcagctcccacggtaacattcgatcgtcactcgccagtgccgcgccggtataagaaaaaccatcgaaaatattggaactgaaatcggtttcgccgagggttaacttagagcctaattgcggtaatggacgaaaaagataggtgcggcttattccgccactctggtcatggttatcttcgctatcggtcttattaagctggtaatcactgcgtaagcgccatgccccggcgttaattccggcggtaccgtaggcattcaggttagtgctgctgctgccgtcctgtgggcggtagctgctggcaaacaagttgtaatccatcaggacaccggcaacaccttctttccatgtagaggggggagcccagttttcactgtgccacgccagccaggcttgcggaatactaatattcagttgctgattggcttgatcgaaattgaagagcatttcaggtcgggaactgaaatcaatacaccgatctatctgtggcaaggactgacggacatctggttttaaaccaaatttatcgaccagactatcattgatgcatggaatggttttgtcaccctttttttgccagttaattttttgcccattactgattttgttgttattcaccgcaacgctaacaaaatattcaccgggagcaatgactcctttttcctttaataaactaatatcaatgcggtcgcgcatacttttatcgagaacattcagattgaattcgaccgccattgcgcaaggcatcgccatgaccaggcaggatacaaaagagagtcgataaatattcacggtgtccatacctgataaatattttatgaaaggcggcgatgatgccgccaaaataatacttatttataatccagcacgtaggttgcgttagcggttacttcacctgccgtgacatcgactgcattatcaatttgttccatccaggcgaaaaagttcagcgtctgttcactactgcttgcatccaggtcaagatctggcgcggcactacctaatacgatgttaccgtcatttttgtccatcagtcgtacaccgaccccagttgcttcgcctgcactggtgttgctcaacaaaggcgtagcaccagttgtcttagccgtgctatcgaaggttacgccaactttggataccggcattccgctaccgttgtcagaagcaggcagatcacagttgatcaagcgaatgtcgacggccactttattgctatgatgctcccggtttatatgggttgtcgtgacttgtccaagatctatgtttttatcaatatcttctggatgaatttcacaaggtgcttcaataacctcccccttaaagtgaatttcgccagaaccttcatcagcagcataaacaggtgcagtgaacagcagagatacggccagtgcggccaatgttttttgtcctttaaacataacagagtcctttaaggatatagaataggggtatagctacgccagaatatcgtatttgattattgctagtttttagttttgcttaaaaatattgttagttttattaaatgcaaaactaaattattggtatcatgaatttgttgtatgatgaataaaatataggggggtatagatagacgtcattttcatagggttataaatgcgactaccatgaagtttttaattgaaagtattgggttgctgataatttgagctgttctattctttttaaatatctatataggtctgttaatggattttatttttacaattttttgtgtttaggcatataaaaatcaacccgccatatgaacggcgggttaaaatatttacaacttagcaatcaaccattaacgcttgatatcgcttttaaagtcgcgtttttcatatcctgtatacagctgacgcggacgggcaatcttcataccgtcactgtgcatttcgctccagtgggcgatccagccaacggtacgtgccattgcgaaaatgacggtgaacatggaagacggaatacccatcgctttcaggatgataccagagtagaaatcgacgttcgggtacagtttcttctcgataaagtacgggtcgttcagcgcgatgttttccagctccatagccacttccagcaggtcatccttcgtgcccagctctttcagcacttcatggcaggtttcacgcattacggtggcgcgcgggtcgtaatttttgtacacgcggtgaccgaagcccatcaggcggaaagaatcatttttgtctttcgcacgacgaacaaattccggaatgtgtttaacggagctgatttcttccagcattttcagcgccgcttcgttagcaccgccgtgcgcaggtccccacagactagcaatacctgctgcgatacaggcaaacgggttcgcaccgctagagccagcggtacgcacggtggaggtagaggcgttctgttcatggtcagcgtgcaggatcagaatacggtccatagcacgttccagaatcggattaacttcatacggttcgcacggcgtggagaacatcatattcaggaagttaccggcgtaggagagatcgttgcgcgggtaaacaaatggctgaccaatggaatacttgtaacacatcgcggccatggtcggcattttgctcagcaggcggaacgcggcaatttcacggtgacgaggattgttaacatccaggctgtcgtgatagaacgccgccagcgcgccggtaataccacacatgactgccattggatggctgtcgcgacggaaagcatggaacagacgggtaatctgctcgtggatcatggtatgacgggtcaccgtagttttaaattcgtcatactgttcctgagtcggtttttcaccattcagcaggatgtaacaaacttccaggtagttagaatcggtcgccagctgatcgatcgggaaaccgcggtgcagcaaaataccttcatcaccatcaataaaagtaattttagattcgcaggatgcggtactagtgaagcctgggtcaaaggtgaacacacctttactaccgagagtacggatatcaataacatcttgacccagcgtgcctttcagcacatccagttcaacagctgtatccccgttgagggtgagttttgcttttgtatcagccatttaaggtctccttagcgccttattgcgtaagactgccggaacttaaatttgccttcgcacatcaacctggctttacccgttttttatttggctcgccgctctgtgaaagaggggaaaacctgggtacagagctctgggcgcttgcaggtaaaggatccattgatgacgaataaatggcgaatcaagtacttagcaatccgaattattaaacttgtctaccactaataactgtcccgaatgaattggtcaatacttccacactgttacataagttaatcttaggtgaaataccgacttcataacttttacgcattatatgcttttcctggtaatgtttgtaacaactttgttgaatgattgtcaaattagatgattaaaaattaaataaatgttgttatcgtgacctggatcactgttcaggataaaacccgacaaactatatgtaggttaattgtaatgattttgtgaacagcctatactgccgccaggtctccggaacaccctgcaatcccgagccacccagcgttgtaacgtgtcgttttcgcatctggaagcagtgttttgcatgacgcgcagttatagaaaggacgctgtctgacccgcaagcagaccggaggaaggaaatcccgacgtctccaggtaacagaaagttaacctctgtgcccgtagtccccagggaataataagaacagcatgtgggcgttattcatgataagaaatgtgaaaaaacaaagacctgttaatctggacctacagaccatccggttccccatcacggcgatagcgtccattctccatcgcgtttccggtgtgatcacctttgttgcagtgggcatcctgctgtggcttctgggtaccagcctctcttcccctgaaggtttcgagcaagcttccgcgattatgggcagcttcttcgtcaaatttatcatgtggggcatccttaccgctctggcgtatcacgtcgtcgtaggtattcgccacatgatgatggattttggctatctggaagaaacattcgaagcgggtaaacgctccgccaaaatctcctttgttattactgtcgtgcttagtcttctcgcaggagtcctcgtatggtaagcaacgcctccgcattaggacgcaatggcgtacatgatttcatcctcgttcgcgctaccgctatcgtcctgacgctctacatcatttatatggtcggttttttcgctaccagtggcgagctgacatatgaagtctggatcggtttcttcgcctctgcgttcaccaaagtgttcaccctgctggcgctgttttctatcttgatccatgcctggatcggcatgtggcaggtgttgaccgactacgttaaaccgctggctttgcgcctgatgctgcaactggtgattgtcgttgcactggtggtttacgtgatttatggattcgttgtggtgtggggtgtgtgatgaaattgccagtcagagaatttgatgcagttgtgattggtgccggtggcgcaggtatgcgcgcggcgctgcaaatttcccagagcggccagacctgtgcgctgctctctaaagtcttcccgacccgttcccataccgtttctgcgcaaggcggcattaccgttgcgctgggtaatacccatgaagataactgggaatggcatatgtacgacaccgtgaaagggagcgactatatcggtgaccaggacgcgattgaatatatgtgtaaaaccgggccggaagcgattctggaactcgaacacatgggcctgccgttcagccgtctcgatgatggtcgtatctatcaacgtccgtttggcggtcagagcaaaaacttcggcggcgagcaggcggcacgcactgcggcagcagctgaccgtaccggtcacgcactgttgcacacgctttatcagcagaacctgaaaaaccacaccaccattttctccgagtggtatgcgctggatctggtgaaaaaccaggatggcgcggtggtgggttgtaccgcactgtgcatcgaaaccggtgaagtggtttatttcaaagcccgcgctaccgtgctggcgactggcggagcagggcgtatttatcagtccaccaccaacgcccacattaacaccggcgacggtgtcggcatggctatccgtgccggcgtaccggtgcaggatatggaaatgtggcagttccacccgaccggcattgccggtgcgggcgtactggtcaccgaaggttgccgtggtgaaggcggttatctgctgaacaaacatggcgaacgttttatggagcgttatgcgccgaacgccaaagacctggcgggccgtgacgtggttgcgcgttccatcatgatcgaaatccgtgaaggtcgcggctgtgatggtccgtgggggccacacgcgaaactgaaactcgatcacctgggtaaagaagttctcgaatcccgtctgccgggtatcctggagctttcccgtaccttcgctcacgtcgatccggtgaaagagccgattccggttatcccaacctgtcactacatgatgggcggtattccgaccaaagttaccggtcaggcactgactgtgaatgagaaaggcgaagatgtggttgttccgggactgtttgccgttggtgaaatcgcttgtgtaagcgtacacggcgctaaccgtctgggcggcaacagcctgctggacctggtggtctttggtcgcgcggcaggtctgcatctgcaagagtctatcgccgagcagggcgcactgcgcgatgccagcgagtctgatgttgaagcgtctctggatcgcctgaaccgctggaacaataatcgtaacggtgaagatccggtggcgatccgtaaagcgctgcaagaatgtatgcagcataacttcagcgtcttccgtgaaggtgatgcgatggcgaaagggcttgagcagttgaaagtgatccgcgagcgtctgaaaaatgcccgtctggatgacacttccagcgagttcaacacccagcgcgttgagtgcctggaactggataacctgatggaaacggcgtatgcaacggctgtttctgccaacttccgtaccgaaagccgtggcgcgcatagccgcttcgacttcccggatcgtgatgatgaaaactggctgtgccactccctgtatctgccagagagcgaatccatgacgcgccgaagcgtcaacatggaaccgaaactgcgcccggcattcccgccgaagattcgtacttactaatgcggagacaggaaaatgagactcgagtttagtatttatcgctataacccggatgttgatgatgctccgcgtatgcaggattacaccctggaagcggatgaaggtcgcgacatgatgctgctggatgcgcttatccagctaaaagagaaagatcccagcctgagcttccgccgctcctgccgtgaaggtgtgtgcggttccgacggtctgaacatgaacggcaagaatggtctggcctgtattaccccgattagcgcactcaaccagccgggcaagaagattgtgattcgcccgctgccaggtttaccggtgatccgcgatttggtggtagacatgggacaattctatgcgcaatatgagaaaattaagccttacctgttgaataatggacaaaatccgccagctcgcgagcatttacagatgccagagcagcgcgaaaaactcgacgggctgtatgaatgtattctctgcgcatgttgtagtacctcttgtccgtctttctggtggaatcccgataagtttatcggcccggcaggcttgttagcggcatatcgtttcctgattgatagccgtgataccgagactgacagccgcctcgacggtttgagtgatgcattcagcgtattccgctgtcacagcatcatgaactgcgtcagtgtatgtccgaaggggctgaacccgacgcgcgccatcggccatatcaagagcatgttgttgcaacgtaatgcgtaaaccgtaggcctgataagacgcgcaagcgtcgcatcaggcaaccagtgccggatgcggcgtgaacgccttatccggcctacaagtcattacccgtaggcctgataagcgcagcgcatcaggcgtaacaaagaaatgcaggaaatctttaaaaactgcccctgacactaagacagtttttaaaggttccttcgcgagccactacgtagacaagagctcgcaagtgaaccccggcacgcacatcactgtgcgtggtagtatccacggcgaagtaagcataaaaaagatgcttaagggatcacgatgcagaacagcgctttgaaagcctggttggactcttcttacctctctggcgcaaaccagagctggatagaacagctctatgaagacttcttaaccgatcctgacagcgttgacgctaactggcgtaacacgttccagcagttacctggtacgggagtcaaaccggatcaattccactctcaaacgcgtgaatatttccgccgcctggcgaaagacgctagtcgttactctagtacgatctccgaccctgacaccaatgtgaagcaggttaaagtcctgcagctcattaacgcataccgcttccgtggtcaccagcatgcgaatctcgatccgctgggactgtggcagcaagataaagtggccgatctggatccgtctttccacgatctgaccgaagcagacttccaggagaccttcaacgtcggtagttttgccagcggcaaagaaaccatgaaactcggcgagctgctggaagccctcaagcaaacctactgcggcccgattggtgccgagtatatgcacattaccagcaccgaagaaaaacgctggatccaacagcgtatcgagtctggtcgcgcgactttcaatagcgaagagaaaaaacgcttcttaagcgaactgaccgccgctgaaggtcttgaacgttacctcggcgcaaaattccctggcgcaaaacgcttcagcctggaaggcggtgacgcgttaatcccgatgcttaaagagatgatccgccacgctggcaacagcggcacccgcgaagtggttctcgggatggcgcaccgtggtcgtctgaacgtgctggtgaacgtgctgggtaaaaaaccgcaagacttgttcgacgagttcgccggtaaacataaagaacacctcggcacgggtgacgtgaaataccacatgggcttcagctctgacttccagaccgatggcggcctggtgcacctggcgctggcgtttaacccgtctcaccttgagattgtaagcccggtagttatcggttctgttcgtgcccgtctggacagacttgatgagccgagcagcaacaaagtgctgccaatcaccatccacggtgacgccgcagtgaccgggcagggcgtggttcaggaaaccctgaacatgagcaaagcgcgtggttatgaagttggcggtacggtacgtatcgttatcaacaaccaggttggtttcaccacctctaatccgctggatgcccgttctacgccgtactgtactgatatcggtaagatggttcaggccccgattttccacgttaacgcggacgatccggaagccgttgcctttgtgacccgtctggcgctcgatttccgtaacacctttaaacgtgatgtcttcatcgacctggtgtgctaccgccgtcacggccacaacgaagccgacgagccgagcgcaacccagccgctgatgtatcagaaaatcaaaaaacatccgacaccgcgcaaaatctacgctgacaagctggagcaggaaaaagtggcgacgctggaagatgccaccgagatggttaacctgtaccgcgatgcgctggatgctggcgattgcgtagtggcagagtggcgtccgatgaacatgcactctttcacctggagcccgtacctcaaccacgaatgggacgaagagtacccgaacaaagttgagatgaagcgcctgcaggagctggcgaaacgcatcagcacggtgccggaagcagttgaaatgcagtctcgcgttgccaagatttatggcgatcgccaggcgatggctgccggtgagaaactgttcgactggggcggtgcggaaaacctcgcttacgccacgctggttgatgaaggcattccggttcgcctgagcggtgaagactccggtcgcggtaccttcttccaccgccacgcggtgatccacaaccagtctaacggttccacttacacgccgctgcaacatatccataacgggcagggcgcgttccgtgtctgggactccgtactgtctgaagaagcagtgctggcgtttgaatatggttatgccaccgcagaaccacgcactctgaccatctgggaagcgcagttcggtgacttcgccaacggtgcgcaggtggttatcgaccagttcatctcctctggcgaacagaaatggggccggatgtgtggtctggtgatgttgctgccgcacggttacgaagggcaggggccggagcactcctccgcgcgtctggaacgttatctgcaactttgtgctgagcaaaacatgcaggtttgcgtaccgtctaccccggcacaggtttaccacatgctgcgtcgtcaggcgctgcgcgggatgcgtcgtccgctggtcgtgatgagcccgaaatccctgctgcgtcatccgctggcggtttccagcctcgaagaactggcgaacggcaccttcctgccagccatcggtgaaatcgacgagcttgatccgaagggcgtgaagcgcgtagtgatgtgttctggtaaggtttattacgacctgctggaacagcgtcgtaagaacaatcaacacgatgtcgccattgtgcgtatcgagcaactctacccgttcccgcataaagcgatgcaggaagtgttgcagcagtttgctcacgtcaaggattttgtctggtgccaggaagagccgctcaaccagggcgcatggtactgcagccagcatcatttccgtgaagtgattccgtttggggcttctctgcgttatgcaggccgcccggcctccgcctctccggcggtagggtatatgtccgttcaccagaaacagcaacaagatctggttaatgacgcgctgaacgtcgaataaataaaggatacacaatgagtagcgtagatattctggtccctgacctgcctgaatccgtagccgatgccaccgtcgcaacctggcataaaaaacccggcgacgcagtcgtacgtgatgaagtgctggtagaaatcgaaactgacaaagtggtactggaagtaccggcaagtgcagacggcattctggatgcggttctggaagatgaaggtacaacggtaacgtctcgtcagatccttggtcgcctgcgtgaaggcaacagcgccggtaaagaaaccagcgccaaatctgaagagaaagcgtccactccggcgcaacgccagcaggcgtctctggaagagcaaaacaacgatgcgttaagcccggcgatccgtcgcctgctggctgaacacaatctcgacgccagcgccattaaaggcaccggtgtgggtggtcgtctgactcgtgaagatgtggaaaaacatctggcgaaagccccggcgaaagagtctgctccggcagcggctgctccggcggcgcaaccggctctggctgcacgtagtgaaaaacgtgtcccgatgactcgcctgcgtaagcgtgtggcagagcgtctgctggaagcgaaaaactccaccgccatgctgaccacgttcaacgaagtcaacatgaagccgattatggatctgcgtaagcagtacggtgaagcgtttgaaaaacgccacggcatccgtctgggctttatgtccttctacgtgaaagcggtggttgaagccctgaaacgttacccggaagtgaacgcttctatcgacggcgatgacgtggtttaccacaactatttcgacgtcagcatggcggtttctacgccgcgcggcctggtgacgccggttctgcgtgatgtcgataccctcggcatggcagacatcgagaagaaaatcaaagagctggcagtcaaaggccgtgacggcaagctgaccgttgaagatctgaccggtggtaacttcaccatcaccaacggtggtgtgttcggttccctgatgtctacgccgatcatcaacccgccgcagagcgcaattctgggtatgcacgctatcaaagatcgtccgatggcggtgaatggtcaggttgagatcctgccgatgatgtacctggcgctgtcctacgatcaccgtctgatcgatggtcgcgaatccgtgggcttcctggtaacgatcaaagagttgctggaagatccgacgcgtctgctgctggacgtgtaatagtttaagtttcacctgcactgtagaccggataaggcattatcgccttctccggcaattgaagcctgatgcgacgctgacgcgtcttatcaggcctacgggaccaccaatgtaggtcggataaggcgcaagcgccgcatccgacaagcgatgcctgatgtgacgtttaacgtgtcttatcaggcctacgggtgaccgacaatgcccggaagcgatacgaaatattcggtctacggtttaaaagataacgattactgaaggatggacagaacacatgaacttacatgaatatcaggcaaaacaactttttgcccgctatggcttaccagcaccggtgggttatgcctgtactactccgcgcgaagcagaagaagccgctagtaaaatcggtgccggtccgtgggtagtgaaatgtcaggttcacgctggtggccgcggtaaagcgggcggtgtgaaagttgtaaacagcaaagaagacatccgtgcttttgcagaaaactggctgggcaagcgtctggtaacgtatcaaacagatgccaatggccaaccggttaaccagattctggttgaagcagcgaccgatatcgctaaagagctgtatctcggtgccgttgttgaccgtagttcccgtcgtgtggtctttatggcctccaccgaaggcggcgtggaaatcgaaaaagtggcggaagaaactccgcacctgatccataaagttgcgcttgatccgctgactggcccgatgccgtatcagggacgcgagctggcgttcaaactgggtctggaaggtaaactggttcagcagttcaccaaaatcttcatgggcctggcgaccattttcctggagcgcgacctggcgttgatcgaaatcaacccgctggtcatcaccaaacagggcgatctgatttgcctcgacggcaaactgggcgctgacggcaacgcactgttccgccagcctgatctgcgcgaaatgcgtgaccagagccaggaagatccgcgtgaagcacaggctgcacagtgggaactgaactacgttgcgctggacggtaacatcggttgtatggttaacggcgcaggtctggcgatgggtacgatggacatcgttaaactgcacggcggcgaaccggctaacttccttgacgttggcggcggcgcaaccaaagaacgtgtaaccgaagcgttcaaaatcatcctctctgacgacaaagtgaaagccgttctggttaacatcttcggcggtatcgttcgttgcgacctgatcgctgacggtatcatcggcgcggtagcagaagtgggtgttaacgtaccggtcgtggtacgtctggaaggtaacaacgccgaactcggcgcgaagaaactggctgacagcggcctgaatattattgcagcaaaaggtctgacggatgcagctcagcaggttgttgccgcagtggaggggaaataatgtccattttaatcgataaaaacaccaaggttatctgccagggctttaccggtagccaggggactttccacagtgaacaggccattgcatacggcactaaaatggttggcggcgtaaccccaggtaaaggcggcaccacccacctcggcctgccggtgttcaacaccgtgcgtgaagccgttgctgccactggcgctaccgcttctgttatctacgtaccagcaccgttctgcaaagactccattctggaagccatcgacgcaggcatcaaactgattatcaccatcactgaaggcatcccgacgctggatatgctgaccgtgaaagtgaagctggatgaagcaggcgttcgtatgatcggcccgaactgcccaggcgttatcactccgggtgaatgcaaaatcggtatccagcctggtcacattcacaaaccgggtaaagtgggtatcgtttcccgttccggtacactgacctatgaagcggttaaacagaccacggattacggtttcggtcagagcacctgtgtcggtatcggcggtgacccgatcccgggctctaactttatcgacattctcgaaatgttcgaaaaagatccgcagaccgaagcgatcgtgatgatcggtgagatcggcggtagcgctgaagaagaagcagctgcgtacatcaaagagcacgttaccaagccagttgtgggttacatcgctggtgtgactgcgccgaaaggcaaacgtatgggccacgcgggtgccatcattgccggtgggaaagggactgcggatgagaaattcgctgctctggaagccgcaggcgtgaaaaccgttcgcagcctggcggatatcggtgaagcactgaaaactgttctgaaataaatatctgtaataagaaatagccctcgccgcttccctctacaggaatggcgaagggctgtcggtttcgacatggttggccatcgtatgatggccttttttgtgcttatcggctactttttcgctgcgctatcagggtaaatttatagtcatcggtattaaaagcgttgcggctatattcaaacacccgaccatcaactaaatatccacggcttactttttcaagaatcggctttgtctggctgatattaagcagacggctcatctcttcggttggcatcagaggaatgatttcctgttcgctacgatcgataaccattttcttcacttcttcgataaagtgatatttgctattttccatgacctgccaggtgagatccgggaacaacgcaagcggcatccaggtttcttccagcgccattggcttttgcttgcgatagcgcacgcgcttcacatgccacacacgatcctgcggggtgatttgtagctgttgctgaagaaaatcgtcagccggaatcacttcgaatatcagaacttcactgtgtgtatcgacgtgacggtcgctcagtttttcatcaaaactggttaactgaaaaatatcgtaattgacccgctcttctttgacgtaagtcccgctgccctgaatgctttcgaggatctgctgctcgactagctggcgcaaagcctgacgcaccgtaacccggctgacgccaaactctgtttgtagcgcactttcagtgggtaacgcatcgccaggtttaagctcgccacgcgcaatttgttcacgaatgcgatcggcaatctgccggtataagggcttgtgtcccatttttagtatctcattaatacgaatttaaccattatgcccgataaattcatcctgtaaataatacaaatacaatacaaataatttcaatcaagtgaaattgatcacataatggtattgttttatcgggcacactggcgcgactataaaaacgatcaagtgaggatcatgatgaatctgacgactctgacccaccgcgatgcgttgtgtctgaatgcgcgctttaccagccgtgaagaggccatccacgcgttgactcaacgtcttgctgctctggggaaaatttccagtactgagcaatttctggaagaagtgtatcgccgtgaaagccttggcccgaccgccttaggtgaagggttggctgtgccgcatggcaaaactgctgcggtaaaagaagcggcgtttgcggtcgccacactcagcgagccgcttcagtgggaaggcgttgatggcccggaagcagttgatttagtggtgctgctggcgattccccccaatgaagcgggtactacgcatatgcaactgctgacagcgctgaccacgcgccttgcggatgatgagattcgggcgcgtatacagagcgcgacgacgcctgatgagttgctcagcgcgctggatgacaagggaggcacgcaaccttctgcctctttttccaacgcgccaactatcgtctgcgtaacggcctgtccggcgggtattgctcacacctatatggctgcggaatatctggaaaaagccggacgcaaactcggcgtaaatgtttacgttgaaaaacaaggcgctaacggcattgaagggcgtttaacggcggatcaactcaatagtgcaaccgcctgtatttttgcggctgaagtcgccatcaaggagagtgagcgttttaatggcattcccgcgcttagtgtgcctgttgccgagccgattcgccatgcagaagcgttgatccaacaagcgcttaccctcaagcgtagcgatgagacgcgtaccgtacagcaagatacgcaaccggtgaaaagtgtcaaaacggagctgaaacaggcactgttgagcggaatctcttttgccgtaccgttgattgtcgcggggggcacggtgctggcggtcgcggtattactgagccaaatcttcgggctacaagatctgtttaatgaagaaaactcctggctgtggatgtaccgcaagctgggcggcgggctgctcggaattttgatggtaccggtgctcgcggcctataccgcctattctctggcagataaaccggcgttagcgccaggctttgcggctggacttgccgccaacatgatcggctccgggtttctcggcgcggtcgttggcggattgatagccggttacttgatgcgctgggtgaaaaatcacttgcgtcttagcagtaaattcaatggattcctgactttttatctctacccggtgctcggtacgttgggagcgggcagtctgatgctgtttgtggtgggggaacctgtcgcctggatcaataacagccttaccgcctggctgaacggtctgagtggaagtaacgcgctgttgctgggtgccattctcggttttatgtgttcctttgaccttggagggccagtgaataaagccgcttatgcattctgcctgggcgcaatggcgaacggcgtttacggcccgtatgccattttcgcctccgtcaaaatggttagcgcatttaccgtaaccgcttccacgatgctcgcaccgcgcctgtttaaagagtttgaaattgagaccgggaaatccacctggctgttagggctggcaggtattaccgaaggggcgatcccgatggcgattgaagatccgctgcgggttattggtagctttgtgctgggctctatggtaacgggcgctattgtcggtgcgatgaatatcggccttagcacacccggtgccggcattttcagcctctttttacttcatgataatggcgcgggcggtgttatggcggcaattggctggtttggcgcggcattggtgggggctgcaatcagcactgcaattctcctgatgtggcggcgtcacgcggttaagcatggcaactatctgactgatggcgtaatgccataaacaaaaaggaaacgacgatgaaagcagtatctcgcgttcacatcaccccgcatatgcactgggatcgagagtggtatttcaccaccgaagagagtcgtattctgctggtcaataatatggaagagatcctgtgccgactggaacaggacaacgaatacaaatattacgtactcgacgggcaaacggcgatcctcgaagattatttcgcggtgaaaccggaaaacaaagaccgtgtgaagaaacaggtagaagccggcaagttgattatcggcccctggtatacccagaccgataccacgattgtttctgcggaatccatcgtccgtaatctgatgtacggaatgcgtgactgcctcgcgtttggcgagccgatgaaaataggttatttaccagattcctttggcatgtccgggcaactgccgcatatctacaatggatttggcattacccgcaccatgttctggcgcggatgtagcgagcgccacggtactgataaaaccgagtttttgtggcaaagcagtgacggtagcgaagtgacggcgcaggtgctgccgctgggctacgccatcggtaagtacttacctgccgacgaaaacggattacgtaaacgcctcgacagttattttgacgtgctggaaaaagcgtctgtaaccaaagagattttgctgccgaatgggcatgaccagatgccattgcagcaaaatatcttcgaagtgatggataagctacgtgagatctaccctcaacgtaagtttgtgatgagccgctttgaagaggtatttgagaagatcgaagcgcagcgagataatctggcaaccctgaaaggggaatttattgatggcaaatatatgcgcgtgcatcgcaccatcggttctacgcgtatggatatcaaaattgcccacgcgcgtattgaaaataagattgttaatctgctggaaccgctggcaacactggcctggacgttgggttttgaataccaccacggcttgctggagaaaatgtggaaagagatcttaaaaaatcatgcccacgacagtatcggctgctgctgtagtgacaaagttcatcgcgaaatcgtcgcccgcttcgaactggctgaagacatggcggataatctgattcgtttctacatgcgcaaaattgccgacaacatgccgcagagcgacgccgacaaactcgtcctgtttaacctgatgccctggccgcgtgaagaagttatcaacaccactgtgcggctgcgcgccagccagtttaatttgcgggacgatcgcggtcagcctgtaccgtattttattcgccatgcccgtgagatcgatccaggcctaatcgatcggcaaatagttcattacggtaattacgatccctttatggagtttgatatacagatcaaccagattgtcccttctatgggctatcgcacgctttatatcgaagcgaatcagcctggcaacgtaattgcggcaaaaagtgacgctgaagggatactggaaaatgctttctggcaaattgcgctcaatgaggatggttctctgcaactggtagataaagacagcggtgtgcgctatgaccgggtattgcaaattgaagaaagctctgatgatggtgatgaatatgactatagtcccgcaaaagaagagtgggtaattaccgcagcgaacgcgaaaccgcaatgcgatattattcatgaagcctggcagagcagggctgttatccgctatgacatggcagtgccgctcaatttgagtgaacgcagcgcccggcaatccactggcagagtaggggtggtgttggttgtcactcttagtcataacagcaggcgtattgatgtggatatcaatcttgataaccaggctgacgatcatcgccttcgtgtcctggtccctacaccttttaacaccgacagtgttctggcagatacgcagtttggtagcctaacgcgccccgtgaacgacagtgcaatgaacaactggcagcaagaaggctggaaagaagcgccggttccggtatggaatatgctcaactatgttgccttacaggaagggcgtaacggcatggctgtctttagcgaagggttacgtgaatttgaagtcatcggtgaagagaagaaaacctttgccattacgttgctgcgtggcgtgggcttactgggcaaagaagatctgcttttaaggcctgggcggcctagcggaattaaaatgccagtcccggacagtcaactacgtggtctgctttcttgtcgcctaagtttattgagttataccggtacgccaaccgccgctggtgtagctcagcaggcgcgagcatggctgactccagtacagtgttacaacaaaatcccatgggatgtgatgaagctcaacaaagccggattcaacgtgccggaaagttatagtttgttgaaaatgcccccagtgggatgcctgataagcgcacttaagaaagctgaagaccgacaagaagtgattttacggctgtttaatccggctgaaagtgcaacctgtgatgcgactgttgctttcagtcgcgaggtgatttcttgcagtgaaacgatgatggatgaacacattaccaccgaggaaaatcaaggtagtaatctaagcgggccttttttacccggccagagtcggacgttcagttaccggcttgcctgaatagcaatcaaaccgaagccacatatgcgcggccagattgttgacaaagggcgctttgttcatgccggatacggcatgaacgctttattcggtctacaaaagcaggcaaattcaatatattgcagagatgatgtagacactggcaagcgtagcgcatcaggtaattttgcgtttatcttcactctcaagccacgtatatgtggctttatttttaacaaaataataaccctgggtgagttaattataatataattataagttaactaaatgttaatattggcggggtggatttatgcctttattagtaatcctgaaactctgcgtcgtattagccagtgaccaaaaaaagaattaaggtcaaccgtgctgtttttgcttcgtctctttttatctttaattgccaaccgaaactaatttcagccttataactcacacattttaaacataaatgtcactaaagttaccttattgaaacatgattaacataatttgtaggaattgatatttatcaatgtataagtcttggaaatgggcatcaaaaagagataaattgttctcgatcaaattggctgaaaggcggtaatttagctataaattgatcaccgtcgaaaaatgcaaatttgcttcaacaaaaacctgtttattgtaaggattttgcggcgtaatatatacgtgggatcaatttgagtttttattaacatgtttgcaacctttctttacgccgtttttgtgtgcattcacatggtatgatgaaagtgttcaaacaaatttctattggggcatgcgtgtgaccctttctaacggggttcactctcggagtcttcatgcgatgagcaaggagtcatgatgttagatatagtcgaactgagccgcttacagtttgccttgaccgcgatgtaccacttcctttttgtgccactgacgctcggtatggcgttcctgctggccattatggaaacggtctacgtcctctccggcaaacagatttataaagatatgaccaagttctggggcaagttgtttggtatcaacttcgctctgggtgtggctaccggtctgaccatggagttccagttcgggactaactggtcttactattcccactatgtaggggatatcttcggtgcgccgctggcaatcgaaggtctgatggccttcttcctcgaatccacctttgtaggtctgttcttcttcggttgggatcgtctgggtaaagttcagcatatgtgtgtcacctggctggtggcgctcggtagtaacctgtccgcactgtggattctggttgcgaacggctggatgcaaaacccaatcgcgtccgatttcaactttgaaactatgcgtatggagatggtgagcttctccgagctggtgcttaacccggttgctcaggtgaaattcgttcacactgtagcgtctggttatgtgactggcgcgatgttcatcctcggtatcagcgcatggtatatgctgaaaggtcgtgacttcgccttcgctaaacgctcctttgctatcgctgccagcttcggtatggctgctgttctgtctgttattgttctgggtgatgaatccggctacgaaatgggcgacgtgcagaaaaccaaactggctgctattgaagccgagtgggaaacgcaacctgcgcctgctgcctttactctgttcggcattcctgatcaggaagaggagacgaacaaatttgcgattcagatcccttacgcactgggcatcattgcaacgcgttccgtggataccccggttatcggcctgaaagagctgatggtgcagcatgaagaacgcattcgtaacgggatgaaggcgtactctctgctcgaacaactgcgttctggttctaccgaccaggcggttcgtgaccagttcaatagcatgaagaaagacctcggttacggtctgctgctgaaacgctatacgccaaacgtggctgatgcgactgaagcgcagattcaacaggcaaccaaagactccatcccgcgtgtagcgccgctgtactttgcgttccgtatcatggtggcgtgtggcttcctgcttctggcaatcatcgcgctctctttctggagtgtcatccgcaaccgcattggcgagaaaaaatggcttctgcgcgccgcgctgtacggtattccgctgccgtggattgctgtagaagcgggctggttcgtggctgaatatggccgccaaccgtgggctatcggtgaagtgctgccgacagctgtggcgaacagcagtctgaccgcaggcgatctcatcttcagtatggtgctgatttgcggcctgtataccctgttcctggtggcagaattgttcttaatgttcaagtttgcacgcctcggcccaagcagcctgaaaaccggtcgctatcactttgagcagtcttccacgactactcagccggcacgctaagacaggagtcgtcaaatgatcgattatgaagtattgcgttttatctggtggctgctggttggcgttctgctgattggttttgcagtcactgacggtttcgacatgggggtgggcatgctcacccgtttcctcggtcgtaacgacaccgagcgtcgaattatgattaactccattgcaccacactgggacggtaaccaggtttggctgatcaccgcgggcggcgcactctttgctgcctggccgatggtctatgccgctgcgttctccggcttctatgtggcgatgatcctcgtgctggcgtctttgttcttccgtccggtcggttttgactaccgctccaagattgaagaaacccgctggcgtaacatgtgggactggggcatcttcattggtagcttcgttccgccgctggtaattggtgtagcgttcggtaacctgttgcagggcgtaccgttcaacgttgatgaatatctgcgtctgtactacaccggtaacttcttccagttgcttaacccgttcggcctgctggcaggcgtggtgagcgtagggatgatcattactcagggcgcaacctatctgcaaatgcgtaccgtgggcgaactgcacctgcgtacccgtgcaacggctcaggtggctgcgctggtgacactggtctgtttcgcactggctggcgtatgggtgatgtacggtatcgatggttatgtcgtgaaaagcacaatggaccattacgcagcctctaacccactgaataaagaagtggttcgtgaagctggcgcatggctggttaacttcaacaacacgccaattctgtgggctattccggcactgggtgtggttctgccgctgctgaccatcctgactgcacgtatggataaagccgcgtgggcgtttgtgttctcctccctgacgctggcctgcatcatcctgacagccggtatcgcaatgttcccgtttgtgatgccgtccagcaccatgatgaacgcaagtctgacaatgtgggatgcaacttccagccagctgacgcttaacgtcatgacctgggttgcggtggttctggtaccgatcattctgctctacaccgcctggtgttactggaaaatgttcggtcgtatcaccaaagaagatattgaacgtaacacccactctctgtactaagtaaggagctaaaaatgtggtatttcgcatggattctgggaacgcttcttgcctgtagctttggggtaatcaccgcgctggcgcttgaacacgtcgaaagtggcaaagccggtcaagaagacatctgatgagtaagattatcgcgactttgtatgcggtaatggacaagcgccccctgcgggcgctttccttcgtgatggcgcttctgttagcaggatgtatgttttgggacccatctcgttttgccgcgaagaccagtgaactggaaatctggcatggtttattgctgatgtgggccgtctgtgctggtgtgattcacggcgtgggctttcgtccgcagaaggttctttggcaagggattttttgcccattgcttgccgatattgttctcattgtcgggctgattttcttcttcttttaaatcagaattctctttaaaaaattatgggccgctccaggcccataaatttttacgctcccttaacttgccctcattcccaaacctcaatcgcgcgcgtatagtagcagcgtttaaaagctctaacttttgttgcattaccgggatgtaaagtgaatacaacgctgtttcgatggccggttcgcgtctactatgaagataccgatgccggtggtgtggtgtaccacgccagttacgtcgctttttatgaaagagcacgcacagagatgctgcgtcatcatcacttcagtcagcaggcgctgatggctgaacgcgttgcctttgtggtacgtaaaatgacggtggaatattacgcacctgcgcggctcgacgatatgctcgaaatacagactgaaataacaagtatgcgtggcacctctttggttttcacgcaacgtattgtcaacgccgagaatactttgctgaatgaagcagaggttctggttgtttgcgttgacccactcaaaatgaagcctcgtgcgcttcccaagtctattgtcgcggagtttaagcagtgactgacatgaatatccttgatttgttcctgaaggctagccttctggttaaacttatcatgttgattttgattggttttagtatcgcatcttgggccattattatccagcggacccgtattcttaacgcagcggcgcgcgaagccgaagcgtttgaagataaattctggtctggaatcgaactctctcgcctctatcaagagagccaggggaaacgggataatctgactggtagcgaacaaatcttttacagcgggttcaaagagtttgtgcgcctgcatcgtgccaatagccatgcgccggaagccgtagtggaaggggcgagccgtgctatgcgtatctccatgaaccgtgaacttgaaaatctggaaacgcacattccgttcctcggtacggttggctccatcagcccgtatattggtctgtttggtacggtctgggggatcatgcacgcctttatcgccctcggggcggtaaaacaagcaacactgcaaatggttgcgcccggtatcgcagaagcgttgattgcgactgcaattggtctgtttgccgctatcccggcagttatggcctacaaccgcctcaaccagcgcgtaaacaaactggaactgaattacgacaactttatggaagagtttaccgcgattctgcaccgccaggcgtttaccgttagcgagagcaacaaggggtaagccatggccagagcgcgtggacgaggtcgtcgcgatctcaagtccgaaatcaacattgtaccgttgctggacgtactgctggtgctgttgctgatctttatggcgacagcgcccatcatcacccagagcgtggaggtcgatctgccagacgctactgaaagtcaggcggtgagcagtaacgataatccgccagtgattgttgaagtgtctggtattggtcagtacaccgtggtggttgagaaagatcgcctggagcgtttaccaccagagcaggtggtggcggaagtgtccagccgtttcaaggccaacccgaaaacggtctttctgatcggtggcgcaaaagatgtgccttacgatgaaataattaaagcactgaacttgttacatagtgcgggtgtgaaaagcgttggtttaatgacgcagcctatctaaacatctgcgtttcccttgcttgaaagagagcgggtaacaggcgaacagtttttggaaaccgagagtgagtaaggcaaccgaacaaaacgacaagctcaagcgggcgataattattagtgcagtgctgcatgtcatcttatttgcggcgctgatctggagtagcttcgatgagaatatagaagctagtgccggaggcggcggtggtagctccatcgacgctgtcttggttgatagtggtgcggtagttgagcagtacaaacgcatgcaaagccaggaaagtagcgcgaagcgttctgatgaacagcgcaagatgaaggaacagcaggctgctgaagaactgcgtgagaaacaagcggctgaacaggaacgcctgaagcaacttgagaaagagcggttagcggctcaggagcagaaaaagcaggctgaagaagccgcaaaacaggccgagttaaagcagaagcaagctgaagaggcggcagcgaaagcggcggcagatgctaaagcgaaggccgaagcagatgctaaagctgcggaagaagcagcgaagaaagcggctgcagacgcaaagaaaaaagcagaagcagaagccgccaaagccgcagccgaagcgcagaaaaaagccgaggcagccgctgcggcactgaagaagaaagcggaagcggcagaagcagctgcagctgaagcaagaaagaaagcggcaactgaagctgctgaaaaagccaaagcagaagctgagaagaaagcggctgctgaaaaggctgcagctgataagaaagcggcagcagagaaagctgcagccgacaaaaaagcagcagaaaaagcggctgctgaaaaggcagcagctgataagaaagcagcggcagaaaaagccgccgcagacaaaaaagcggcagcggcaaaagctgcagctgaaaaagccgctgcagcaaaagcggccgcagaggcagatgatattttcggtgagctaagctctggtaagaatgcaccgaaaacggggggaggggcgaaagggaacaatgctagccctgccgggagtggtaatactaaaaacaatggcgcaagtggggccgatatcaataactatgccgggcagattaaatctgctatcgaaagtaagttctatgacgcaagctcctatgcaggcaaaacctgtacgctgcgcataaaactggcacccgatggtatgttactggatatcaaacctgaaggtggcgatcccgcactttgtcaggctgcgttggcagcagctaaacttgcgaagatcccgaaaccaccaagccaggcagtatatgaagtgttcaaaaacgcgccattggacttcaaaccgtaatcgcgatgttgactgttcggacggtcaacatcaggcaccggttgccacggggttctggtagttttgtgtattttagtttgttaacattctgctaaattatcgtgggccatcggtccagataagggagatatgatgaagcaggcattacgagtagcatttggttttctcatactgtgggcaagtgttctgcatgctgaagtccgcattgtgatcgacagcggtgtagattccggtcgtcctattggtgttgttcctttccagtgggcggggcctggtgcggcacctgaagatattggcggcatcgttgctgctgacttgcgtaacagcggtaaatttaatccgttagatcgcgctcgtctgccacagcagccgggtagtgcgcaggaagtacaaccagctgcatggtccgcactgggcattgacgctgtagttgtcggtcaggtcactccgaatccggatggttcttacaatgttgcttatcaacttgttgacactggcggcgcaccgggtactgtacttgctcagaacagctacaaagtgaacaagcagtggctgcgttatgctggtcataccgccagtgatgaagtgtttgaaaaactgaccggcattaaaggtgcgttccgtactcgtattgcctacgttgttcagaccaacggcggtcagttcccgtatgaactgcgcgtatctgactatgacggttacaaccagtttgtcgttcaccgtagtccgcagccgctgatgtctccggcgtggagtccagacggttctaaactggcttatgtgaccttcgaaagcggtcgttccgcgctggttattcagacgctggcaaatggcgctgtacgtcaggtggctagtttcccgcgtcacaacggtgcacctgcattcagcccagacggcagcaaactggcattcgccttgagcaaaaccggtagtctgaacctgtacgtaatggatttggcttctggtcagatccgccaggtgactgatggtcgcagtaacaataccgaaccgacctggttcccggatagccagaacctggcatttacttctgaccaggccggtcgtccgcaggtttataaagtgaatatcaacggcggtgcgccacaacgtattacctgggaaggtagccagaaccaggatgcggatgtcagcagcgacggtaaatttatggtaatggtcagctccaatggtgggcagcagcacattgccaaacaagatctggcaacgggaggcgtacaagttctgagctccacgttcctggatgaaacgccaagtctggcacctaacggcactatggtaatctacagctcttctcaggggatgggatccgtgctgaatttggtttctacagatgggcgtttcaaagcgcgtcttccggcaactgatggacaggtcaaattccctgcctggagcccgtatctgtgataataattaattgaatagtaaaggaatcattgaaatgcaactgaacaaagtgctgaaagggctgatgattgctctgcctgttatggcaattgcggcatgttcttccaacaagaacgccagcaatgacggcagcgaaggcatgctgggtgccggcactggtatggatgcgaacggcggcaacggcaacatgtcttccgaagagcaggctcgtctgcaaatgcaacagctgcagcagaacaacatcgtttacttcgatctggacaagtacgatatccgttctgacttcgctcaaatgctggatgcacatgcaaacttcctgcgtagcaacccgtcttacaaagtcaccgtagaaggtcacgcggacgaacgtggtactccggaatacaacatctccctgggtgaacgtcgtgcgaacgccgttaagatgtacctgcagggtaaaggcgtttctgcagaccagatctccatcgtttcttacggtaaagaaaaacctgcagtactgggtcatgacgaagcggcatactccaaaaaccgtcgtgcggtactggtttactaagagaattgcatgagcagtaacttcagacatcaactattgagtctgagcttactggttggtatagcggccccctgggccgcttttgctcaggcaccaatcagtagtgtcggcagtggcagcgtcgaagaccgcgtcactcaacttgagcgtatttctaatgctcacagccagcttttaacccaactccagcaacaactttctgataatcaatccgatattgattccctgcgtggtcagattcaggaaaatcagtatcaactgaatcaggtcgtggagcggcaaaagcagatcctgttgcagatcgacagcctcagcagcggtggtgcagcggcgcaaagtaccagcggcgatcaaagcggtgcggcggcaagtacgacgccgacagctgatgctggtactgcgaatgctggcgcgccggtgaaaagcggtaatgcaaacacggattacaatgcagctattgcgctggtgcaggataaatcccgccaggatgacgcaatggtggcatttcagaatttcatcaaaaattaccctgatagtacttacctgccaaacgccaattattggctgggtcagttaaactacaacaagggtaaaaaagatgatgcggcgtactattttgctagcgtagtgaaaaactatccgaagagtccaaaggctgcagatgcgatgtttaaagtcggcgtcatcatgcaggacaaaggtgacaccgcaaaagcgaaagccgtataccagcaggttatcagtaaataccctggtactgatggcgctaaacaggcacaaaaacgtctgaacgcgatgtaatgcataacacacgaccagaagtcgcattatttctggtcgtgtcgtgcgaatcataagcagttgagtgatctacatcgaaatttttgttgcgctcaagtctgaaatcagtaatatatgccgccgttgccacgggatatcaaacaaaccgaaagcaacgaaaaagtgggtcgttagctcagttggtagagcagttgacttttaatcaattggtcgcaggttcgaatcctgcacgacccaccaatcgctaaggtggaagcggtagtaaaacgtgaaggataacgttgcatgagcaacggcccgaagggcgagacgaagtcgagtcatcctgcacgacccaccactaacatagttagttgtagtatccagcgtagtatcgggtgattagctcagctgggagagcacctcccttacaaggagggggtcggcggttcgatcccgtcatcacccaccaccgggtcgttagctcagttggtagagcagttgacttttaatcaattggtcgcaggttcgaatcctgcacgacccaccagttttaacatcgaagacagatgttaagcgtgtaggataacgttgcgtcagcaacggcccgtagggcgagcgaagcgagtcatcctgcacgacccaccactaatgacggtgggttcggtggaagtagtttgtagtatccagcgcagtatcgggtgattagctcagctgggagagcacctcccttacaaggagggggtcggcggttcgatcccgtcatcacccaccactcgggtcgttagctcagttggtagagcagttgacttttaatcaattggtcgcaggttcgaatcctgcacgacccaccagttttaacatcaaactcagatgttaagcgtgaaggataacgttgcgccagcaacggcccgtagggcgagcgaagcgagtcatcctgcacgacccaccaatcttaaagattggccccgagtaaaaatctttcaggtaacacccgtatgggtcgttagctcagttggtagagcagttgacttttaatcaattggtcgcaggttcgaatcctgcacgacccaccaatttaaaggtggttactggtagagaacgtgaaggataacgttgcgttagcaacggcccgaagggcgagacgaagtcgagtcatcctgcacgacccaccatcctgaatgattaaggcagcataatcccgcaaggggtcgttagctcagttggtagagcagttgacttttaatcaattggtcgcaggttcgaatcctgcacgacccaccaatgtaaaaaagcgccctaaaggcgcttttttgctatctgcgatactcaaagattcgaacctgcagcaggtttgagttgagcgcagcgaaacaacggagccgctcgcggcgacggcccgaagggcgagcgaagcgagtcatcctgcacgacccaccaatgtaaaaaagcgccctaaaggcgcttttttgctattcaggcatcctcaatttcactttgtaaacctgatgacatcgtcagagcttactgtgcaagcaactctatgtcggtggaattaggcgtaaaatgacgcatcctgcacattaggcgtaattcgagtgacttttccccaccattcgactatcttgtttagcatataaaacaaattacaccgataacagcgaatattacgctaatgtcggttttaacgttaagcctgtaaaacgagatggtaagatgagcgtaatgtttgatccagacacggcgatttatcctttccccccgaagccgacgccgttaagcattgatgaaaaagcgtattaccgcgagaagataaaacgtctgctaaaagaacgtaatgcggtgatggttgcccactactataccgatcccgaaattcaacaactggcagaagaaaccggtggctgtatttctgattctctggaaatggcgcgcttcggtgcaaagcatcccgcttctactttgttagtcgctggggtgagatttatgggagaaaccgccaaaattctcagtccggaaaaaacaattctgatgccgacacttcaggctgaatgtagtctggatctcggctgccctgttgaagaatttaacgcattttgcgatgcccatcccgatcgtactgtcgtcgtctacgccaacacttctgctgcggtaaaagcgcgcgcagattgggtggtaactagtagcattgccgtcgaacttattgatcatcttgatagtttgggtgaaaaaatcatctgggcacccgacaaacatctggggcgttacgtgcaaaaacagacgggtggagacattctatgctggcagggtgcctgtattgtgcatgatgaatttaagactcaggcgttaacccgcttgcaagaagaatacccggatgctgccatactggtgcatccagaaagtccacaagctattgtcgatatggcggatgcggtcggttccaccagtcaactgatcgctgctgcgaaaacattgccacatcagaggcttattgtggcaaccgatcggggtattttctacaaaatgcagcaggcggtgccagataaagagttactggaagcaccaaccgcaggtgagggtgcaacctgccgcagctgcgcgcattgtccgtggatggccatgaatggccttcaggccatcgcagaggcattagaacaggaaggaagcaatcacgaggttcatgttgatgaaaggctgcgagagagggcgctggtgccgctcaatcgtatgctggattttgcggctacactacgtggataacgaataataaggcgtaacgttacgctttgggggaaagatggatttttttagtgtgcagaatatcctggtacatataccaataggggcaggcggttatgatctcagttggatcgaagcggtaggcacgatcgccgggttgctgtgtattggccttgccagtctggagaagatcagcaactacttctttggcctgatcaacgtcaccttgtttggcattattttctttcagattcagctgtatgccagcctgctattacaggtgtttttctttgccgcgaatatttacggttggtatgcgtggagccgacaaaccagtcagaacgaggcggagttgaaaattcgctggttgccattgccgaaggcactcagctggttggcggtttgcgttgttagcattggtctgatgacggtatttatcaatccggtgtttgcatttttgacccgcgtggcagtcatgatcatgcaagcattaggattacaggttgtgatgcctgaactgcaaccggacgctttcccgttctgggatagttgcatgatggtgttatctatcgtggcaatgattctgatgacgcgtaagtatgtggaaaactggctgttgtgggtgattattaacgtgattagcgtcgttatttttgcacttcagggcgtttacgccatgtctctggagtacatcatcctgacctttattgcgctcaacggcagccggatgtggatcaacagcgcacgtgaaagaggcagtcgcgcgctgtcccattaatggtgatgatgactatggccagacaccccttcattcaggtggcagtctggcccatgacaaggttgatattccatctgaatggtggcgtgctcaatctgatagtgatccatcaggtagtgttggatctgatccaacaaggcatcgtgatcgtgtggcgggatcacctgcacatgcaacgtcatcaccggcttctcgcctaccatccatacatgtacatggtgcacattgcggacttccgggatttcccggcacatacgacgcttcagttcagcgatatccaggcttaccggtgcaccttcaagtaattcattcacgctatctttcaacagtcgccacgcgctacgcagaaccagaaggctcaccagtatgctgagaatggggtcagcaggtgtccagccagtccagataataatcaacgcggcaataatagccccaacgctacccagcaggtccccgagcacatgcagtgccgctgctcgtacgttgaggtttttctcttcgctgccgtgatgaagtaaccagaaagaaagtatatttgccagcaacccagccacggcaattgccatcatcatgccgccctcgaccggacgcggcgtgcggaagcgttctatcgcctcccagacaatcaaaatggtaattaccacgagggctatggcattcacaaacgccgcgagcgtggtcagtcttagccaaccgaaagtgtggcgaatggtgggaggacgacgactaaattgcacggcgagtagggcgaaaagcagggcggcagtatcggtcaacatatgacccgcatcggccagcaatgccagagaaccagaaagaaaaccaccaacgacttctaccagcataaacccggcagtcacgccgaaagcatacaacaagcgacgagcattattatcttctggcaggtgactggacgtgtgactgtgactgtgcgccatgacgagtcatcccttaattattctcacttaactttatgacatcatactgcttttagaagtgaaaaattaaaagggagagactccgctctcccattattggctattttgcagggttactgcgtggtaccgtcggttttggtatcgacatcattattgatgccatcaccggtttgtacctttttattgatatccggacagcgaccatctttgcacatggtgttcttgtgctcttcatctttggtcattccgtcattgttcatactagaaccatcgctatgcagcattgtgccgccagaaccggtatttaccccgttattgtcgacgttatttggcgcgacattttcacgggcgtcaggggctacctggcccgcatcagctgcggcgtttgcctggccgttattagtttgcgctccgctatcggcagccagtgcggcaccgctggcaaggcttagagtggcagtcagaaataatgtggccagttttgtcattttcataggatgctcctgttatggtcgttatgtcggataacctcttccaacagtgcatttgcaggtgaatataaggcattggtttaagatttcagccaggttatgaaacgcagcagagaatcttgaaataattaacaaacaaaggagttacagttagaaattgtaggagagatctcgtttttcgcgacaatctggcgtttttcttgctaattccaggattaatccgttcatagtgtaaaaccccgtttacacattctgacggaagatatagattggaagtattgcattcactaagataagtatggcaacactggaacagacatgaattatcagaacgacgatttacgcatcaaagaaatcaaagagttacttcctcctgtcgcattgctggaaaaattccccgctactgaaaatgccgcgaatacggttgcccatgcccgaaaagcgatccataagatcctgaaaggtaatgatgatcgcctgttggttgtgattggcccatgcagtattcatgatcctgtcgcggcaaaagagtatgccactcgcttgctggcgctgcgtgaagagctgaaagatgagctggaaatcgtaatgcgcgtctattttgaaaagccgcgtaccacggtgggctggaaagggctgattaacgatccgcatatggataatagcttccagatcaacgacggtctgcgtatagcccgtaaattgctgcttgatattaacgacagcggtctgccagcggcaggtgagtttctcgatatgatcaccccacaatatctcgctgacctgatgagctggggcgcaattggcgcacgtaccaccgaaagccaggtgcaccgcgaactggcaagtgggctttcttgtccggtcggcttcaaaaatggcaccgacggtacgattaaagtggctatcgatgccattaatgccgccggtgcgccgcactgcttcctgtccgtaacgaaatgggggcatagcgcgattgtgaataccagcggtaacggcgattgccatatcattctgcgcggcggtaaagagcctaactacagcgcgaagcacgttgctgaagtgaaagaagggctgaacaaagcaggcctgccagcacaggtgatgatcgatttcagccatgctaacagctccaaacaattcaaaaagcagatggatgtttgtgctgacgtttgccagcagattgccggtggcgaaaaggccattattggcgtgatggtggaaagccatctggtggaaggcaatcagagcctcgagagcggggagccgctggcctacggtaagagcatcaccgatgcctgcatcggctgggaagataccgatgctctgttacgtcaactggcgaatgcagtaaaagcgcgtcgcgggtaaggtttaattgtcggatgcgccgtcagagtggcgtatccgatgaatcaccacaggcctgataagtcgcgcagcgtcgcatcaggcaatgtgctccattgttagcaacaaaaaagccgactcacttgcagtcggctttctcattttaaacgaatgacgtttacttcgctttaccctggtttgcaaccgccgctgctttcgctgcgatctcgtcagcattacccagataatagcgtttcagcggtttgaaattctcgtcgaactcatacaccagcggcacgccagtcgggatattaagctcaagaatctcttcttcgctcatgttatcaagatatttcaccagcgcacgtaaagagttaccgtgtgcagcgatgatcacgcgctcaccgctcttcatacgcggcagaatagtttcattccagtaagggatcacgcggtcaatggtcagcgccaggctttccgtcagcggcagttctttctcgctcagtttcgcgtaacgcggatcgtgacccggataacgctcatcatctttagtcagttccggcggagtcactgcaaaaccacgacgccactgtttcacctgctcgtcgccatacttttcagcagtttccgctttgttcagaccctgcaacgcaccgtagtgacgttcgttcagtttccaggatttctcaacgggcagccatgcctgatccagttcgtccagcacattccacagggtatggatagcgcgtttcagcacagaagtgtaagcaaagtcaaagctgtaaccttcctctttcagcagcttacctgctgcttttgcttcgcttacgcctttctcagacagatccacgtcgtaccaaccggtgaaacggttttctttgttccactgactttcgccatgacgaaccagaaccagcttagttacagccatatacttactcctcaaatcatcttttaatgataataattctcattatattgccgcgacgaagcaacagcaatgcttacgcataaccatagcgaaaatagtggcgcagtgtaaggttgttgtgaatattgagttgcaaatatgtcggtgtttgctggtgatttgaacaatatgagataaagccctcatgacgagggcgtaacattactcagcaataaactgatattccgtcaggctggaatactcttcgccaggacgcaggaagcagtccggttgcggccattcagggtggttcgggctgtccggtagaaactcgctttccagagccagcccttgccagtcggcgtaaggttcggttccccggctcggtgtgccgccgaggaagttgccggagtagaattgcagagccggagcggtggtgtagaccttcagctgcaatttttcatctgcactccagacatgcgccgccactttcttgccatcgcctttggcctgtaacaagaatgcgtgatcgtaacctttcactttgcgctgatcgtcgtcggcaagaaactcactggcgatgattttggcgctgcggaaatcaaaagacgttccggcgacagatttcaggccgtcgtgcggaatgccgccttcatcaaccggcagatattcgtccgccagaatctgcaacttgtgattgcgcacgtcagactgctcgccgtcaagattgaaatagacgtgattagtcatattcaccgggcaaggtttatcaactgtggcgcgataagtaatggagatacggttatcgtcggtcagacgatattgcaccgtcgcgccgagattacccgggaagccctgatcaccatcatcactactcagggcaaacagcacctgacgatcgttctggttcacaatctgccagcgacgtttgtcgaacccttccggcccgccgtgcagctggttaacgccctgacttgggctaagcgtcacggtttcaccgtcaaaggtataacggctattggcgatacggttggcataacgaccaatagaggcccccagaaacgcggcctgatcctgatagcattccgggctggcacagccgagcagcgcctcgcggacgctgccatcggaaagcggaatacgggcggaaagtaaagtcgcaccccagtccatcagcgtgactaccatccctgcgttgttacgcaaagttaacagtcggtacggctgaccatcgggtgccagtgcgggagtttcgttcagcactgtcctgctccttgacttggtttacaaacgtaaaaagtctctttaatacctgtttttgcttcatattgttcagcgacagcttgctgtacggcaggcaccagctcttccgggatcagcgcgacgatacagccgccaaatccgccgccggtcatgcgtacgccacctttgtcgccaatcacagctttgacgatttctaccagagtgtcaatttgcggcacggtgatttcgaaatcatcgcgcatagaggcatgagactccgccatcaactcgcccatacgtttcaggtcgccttgctccagcgcgctggcagcttcaacggtgcgggcgttttcagtcagtatatgacgcacgcgttttgccacgatcgggtccagttcatgcgcaacagcgttgaactcttcaatggtgacatcacgcagggctggctgctggaagaaacgcgcaccggtttcgcactgttcacgacgggtgttgtattcgctgccaaccagggtacgtttgaagttactgttgatgatgacgacagccacacctttgggcatggaaactgctttggtccccagactgcggcaatcgatcagcaaggcatgatctttcttgccgagcgcggaaattagctgatccatgatcccgcagttacagcctacaaactggttttctgcttcctgaccgttaagcgcgatttgtgcgccgtccagcggcagatgataaagctgctgcaatacggttccgaccgcgacttccagactagcggaagaacttaacccggcaccctgcggcacattgccgctgatcaccatgtccacgccgccgaagctgttgttacgcagttgcagatgtttcaccacgccacgaacgtagttagcccattgatagttttcatgtgcgacaatgggcgcatcgagggaaaactcgtcgagctgattttcataatcggctgccatcacgcgaactttacggtcatcgcgtggtgcacaactgatcacggtttgataatcaatcgcgcagggcagaacgaaaccgtcgttgtagtcggtgtgttcaccaatcaaattcacgcggccaggcgcctgaatggtgtgagtggcagggtagccaaatgcgttggcaaacagagattgtgttttttctttcagactcatttcttacactccggattcgcgaaaatggatatcgctgactgcgcgcaaacgctctgctgcctgttctgcggtcaggtctcgctgggtctctgccagcatttcataaccaaccataaatttacgtacggtggcggagcgcagcagaggcggataaaagtgcgcgtgcagctgccagtgttgattctcttcgccattaaatggcgcgccgtgccagcccatagagtaggggaaggagcactggaagaggttgtcataacgactggtcagctttttcaacgccagcgccagatcgctgcgctgggcgtcggtcaaatcggtgatccgtaaaacgtgggctttgggcagcagtagcgtttcgaacggccaggcagcccagtaaggcacgacggctaaccagtgttcggtttcgacaacggtacggctaccgtctgccagctcgcgctgaacataatccaccagcattggacttttctgttcggcaaaatattctttttgcaggcggtcttcgcgctcagcttcgttaggcaggaagctatttgcccaaatctgaccgtgcggatgcgggttagagcagcccatcgccgcgcctttgttttcaaaaacctgcacccatgggtacgttttccccagttctgcggtttgctcctgccaggttttgacgatttccgtcaatgctgcaacgctgagctctggcagcgttttactgtgatccggactaaagcagatcacccggctggtgccgcgcgcgctctggcaacgcatcagcggatcgtgactttctggcgcatctggcgtgtcagacatcaaagccgcaaagtcattagtgaaaacgtaagtcccggtgtaatcggggtttttatcgcctgtcacccgcacattacctgcgcagaggaagcaatctggatcgtgcgcaggtaacacctgtttggctggcgtttcctgcgccccctgccaggggcgcttagcgcggtgcggactaaccagaatccattgcccggtgagcgggttgtagcggcgatgtggatgatcaacgggattaaattgcgtcatggtcgttccttaatcgggatatccctgtggatggcgactctgccagtgccaggtgtcctgcgccatttcatcgagtgtgcgcgttacgcgccagttcagttcacggtcggctttgctggcgtccgcccagtaggccggaaggtcgccctcgcgacgcggtgcaaaatgataattaaccggtttgccgcaggctttgctgaaggcattaaccacgtccagcacgctgttgcctacgccagcgccgaggttgtagatgtgtacgcctggcttgttcgccagtttttccatcgccacgacgtgaccgtccgccagatccattacgtggatgtaatcgcgtacgccagtaccatcttcggtcggataatcgttaccaaaaatcgccaggctgtcgcgacggcctacagcaacctgggcgatgtatggcatcaggttattcggaatgccttgcggatcttcgcccatatcgccgctcggatgcgcgccaaccgggttgaagtagcgcagcagggcaatgctccagtccggctgggctttttgcagatcggtgaggatctgttccaccatcagcttgcttttgccgtaagggctttgcggtgtgccggtcgggaagctttcaacgtatggaattttgggctgatcgccataaacggtggcggaggagctaaaaataaagtttttgacgttagcggcgcgcatggcgctaatcaggcgcagagtgccgttgacattgttgtcgtaatattccagcggtttttgtacgctttcgcccacggctttcagcccggcgaagtggatcacggtgtcgatagcgtgatcgtgcaggatctcggtcatcaacgcttcgttacgaatatcgccttcaacaaacgttggatgtttgccgcctaaacgctcgataacaggcagtacgatgcgcttactgttacagaggttatcaagaatgatgacatcatgaccgttttgcagtaattgcacacaggtatgacttccaatgtaaccgctaccaccggtaaccagaactctcataattcgctccattaggcttatggtatgaaataaccatagcataacaaagatgcgaaaagtgtgacatggaataaattagtggaatcgtttacacaagaatttagccgttttttatgcgcgattaagtgattataaaacagagggtttatgaatgattgcgctttttatctgaaaaaagacgcggtttcatgcctgcatgcgtcgaaccgttggccggagagggtgctaaggccgcctccggcaaggtcagcactaccgactcaatatatttttgtcagcacatagcgatagagtccaccgtccggcacgaactcaagacgatgggtaatacaggcaggcgcatcttcagcgtggtggctaacaaacaacaattgcgtttcaccttcgctaatcagcacatcaacaaaacggcggataagctggcgattcagcggatcaagcccctgtagtggttcatcgagaataagcaacgtcggatgtttcaccagtgcgcggacaatcagcgccagacgctgctgtccccaggaaagactatggaacggagcgtcagccgtgcgtttatcaatgccgagaatatccagccactgctgcaccagtttttgctggcgatcgctaacggcctgataaatgccaatgctatcaaaatagccagaaagaatcacattacgcacggtagtgctgacccggtaatccagatgcaaactactgctgacgtaaccgatatgctttttgatatcccagatggtttcgccgctgccgcgacgtcgtccgaaaagcgtcaaatcgttgctgtaaccttgcggatgatcgccagtaaccaggcttaataacgtgctttttcctgcaccatttggcccgacaatttgccagtgttcgcctggattcacctgccagctaaggttattaagaatggggcgatcgttataagaaaccacgccattgttcagcacaatgcgcggttcgttggcgggtaaggcgtgacgtgcactaggttcatccggctccggcagttgcacaccttcaagctgttcactatgcgccagttgcgcgacgagtgcttgttggagcagttcctctttagcgccagtttccgctaacgtgcaatccgccagcacgccagcaaactggacaaactccgggatctcatcgaagcgattgagcaccagtaccagagtaataccggactgatgtaagctggcgagtcgctcagccagctgctgacgactggcaacatccaggccatcgaacggctcatcaagaatcaacaagtcaggctcgctcatcagcgcctgacacagcagggtttttcgcgtctcgccagtggaaaggtatttaaagcgtcggtcgaggagggcggtaataccgaactgctgcgccagttgcatgcaacgcggtgcatcctttacttcatcctgaatgatctcagccgtagtgcgtccggtgtcatcttcgccagggccgagcatatcggtgttattccgctgccattcgtcgctgacgagtttttgcaattgctcgaaggagagacgagtgatgtgggaaaactggctttgccgttcacctttcaaaagcggaagttcccccgccagcgcgcgggccagggcgcttttcccgcttccattgctaccgacaaacgcccaactatcacccgcgtttaacgttagctgaggcaattgcagcgtttttgtgtcgctaagacgaaacgtgccttgcaaaatttgcaagctactcattttatatcccactttgtgcagcgattactgacagggatacgtgtttcataacaaattgtcaacacgcttagcacagcgtggcgataatcacgctgtcggcattaaagtaggccgtgacattctgtccttgctgaagagaagtcgcttcatttaccggcactgtggcgcacagtgtttgcccgtcgggtagcgccattaatacttcgcactgctctgcgccgcgctcaatatgactaataatacccggtaattggttgtcagcgttttgcgcgaccgcctcgtcctgagtaatacctacccacggcgcttttagcaatatcaacacttctttgccttcatccagccccagacgcgcgccgctttgtgcggtaattgcgactttcaggcgtgtttttccgtcagccagtaagacatcaacatgctgttgaacgtcatcatgatcgcgggcggtgatggtaccgaaccactggttacgggcgctggtttgcagactaaaacgactgatcgcggccagcaggctgttcagcggcagggcgtcatcgtcacttaacacatcaaaggctttttgctggatttgcgccagtaagtcatagagctgaatcagtcgctgaccatagcgggtcagtactgcgccgccgccacctttaccgcctgttgcgcgctcgaccagaatatgctcacttaactgattcatctcgttaatggcatcccaggcgcttttatagctaataccggcatctttcgctccctggctaatggaaccggaaagcgcaatgtgttttagtaggctaatgcggcgcgggtcggcgaataatttttgttggagcttaagggtgagaaggatttcggcctgcataacaatgtcctggcaaaagtcttattgtgacggaaaacgaacgccacgcaaagctgaccgcacaaaaggggagtgcttttctgtgcttagcggttagaatagtctcatgactatatctggagttgaccatgttagagttattaaaaagtctggtattcgccgtaatcatggtacctgtcgtgatggccatcatcctgggtctgatttacggtcttggtgaagtattcaacatcttttctggtgttggtaaaaaagaccagcccggacaaaatcattgattccctgaatgcccgcttagtcgggcattttctttttctcaacttcctgcttttcctgccgatattttttcttatctacctcacaaaggttagcaataactgctgggaaaattccgagttagtcgttatattgtcgcctacataacgttacattaaggggttaccaatggctcgtaaatggttgaacttgtttgccggggcggcactctctttcgctgttgctggcaatgcactggcagatgaagggaaaatcacggtgttcgccgccgcaagtctgactaacgcaatgcaggacattgctacgcagtttaaaaaagagaaaggcgtggatgtggtttcttctttcgctagcagttctactctcgcccgtcagattgaagcgggtgcgcctgcggatctgtttatttctgccgatcagaaatggatggattatgcggttgataaaaaagcgatcgatacagctacgcgtcagacactgctcggcaatagcctggtcgttgtagcaccgaaagccagcgtgcagaaagatttcaccatcgacagcaaaaccaactggactagtctgctgaatggcggtcgcctggcggttggcgatccggaacatgttcccgctggcatttatgcaaaagaagcactgcaaaaactgggcgcatgggatacgctctctccgaaactggccccagcggaagatgttcgtggggcgctggcgctggtcgaacgtaacgaagcgcctctgggcattgtctacggttctgacgcagttgccagcaaaggggtaaaagtggttgccaccttcccggaagatagtcataaaaaagtggaatatccggttgctgttgtggaagggcataacaatgcgacagtgaaagcattttatgattatctgaagggaccgcaggcagcggaaatctttaaacgttacggatttacaatcaagtaatgatactgaccgatccagaatggcaggcagttttattaagcctgaaagtttcttccctggctgtgctgtttagcctgccgtttgggatcttttttgcctggttactggtgcgttgcacgtttccgggcaaagctctgctcgacagcgtactgcatctaccgctggtgttaccgcccgtggtcgtcggttacttattattagttagcatgggacggcgcggatttatcggtgaacgtctgtatgactggtttggtattaccttcgcctttagctggcgcggcgcggttctcgctgccgccgtcatgagctttccgctgatggtgcgggcaattcgtctggcgctggaaggggttgatgtcaaactggaacaggccgcaagaacactgggggccgggcgctggcgcgttttctttactatcacgttaccgctgaccttaccgggaattattgttggtacggtactggcttttgctcgttctctcggtgagtttggtgcaaccatcacctttgtgagcaacattcctggtgaaacgcgaaccattccttctgccatgtataccctgatccagacccccggcggggaaagtggagcggcgagactgtgcattatttctattgcgctggcgatgatctccctgttgattagtgaatggctggccagaatcagccgtgaacgggcggggcgctaatcatgctggaactgaatttttcccagacgttgggcaaccattgcctgactattaatgaaacgctgcccgccaatggcatcactgctatctttggcgtctccggtgccggaaaaactagcctgattaacgccatcagtggactgacgcgcccgcaaaaagggcggattgtcctcaatgggcgggtactaaatgatgccgaaaaaggtatctgcctgacgccggaaaagcgtcgcgttggctatgtttttcaggatgcgcggctgttcccgcattacaaagtgcgtggcaatctgcgctacggcatgagcaaaagtatggtcgatcagttcgataagctggtggcgcttttaggcattgaaccgttgcttgaccgtttaccaggcagcctgtccggaggcgaaaaacagcgcgtggcgattggtcgggctttgctgacagcaccggaattgctgttgctggatgaaccgctggcgagtctggatattccgcgtaaacgcgaactgttgccttatctgcaacggctgacacgggaaatcaacattccgatgttgtatgtcagccatagcctggatgagatcctccatctggcagacagagtgatggtactggaaaacggtcaggtgaaagcctttggcgcgctggaggaagtgtggggcagtagcgtgatgaatccgtggctgccgaaagagcaacaaagtagcattctgaaagtgacggtgcttgagcatcatccgcattacgcgatgaccgcgctggcgctgggcgatcagcatttgtgggtcaataagctggacgaaccgctgcaagctgcgctacgtatccgcattcaggcttccgatgtttctctggttttacaaccgccgcagcaaaccagcattcgtaacgtattgcgggcaaaagttgttaatagttatgacgacaacggccaggtggaagtggaactggaagtcggcggtaaaacgctgtgggcgcgtatcagcccgtgggccagggatgaactggcgatcaaacctggcctgtggctgtacgcgcaaattaaaagtgtgagcataaccgcctgattaaatcaggtggctataaatgaactgggcaatgctgtcggtggtgttatcaccaatcacaatgttggcgcgcgcttttaccgcgtcatcggcgttgcccatcgccacgcctgtaccagcggcttccagcatactgatatcattaaagttatcgccgaatgccacgacgttttccatgctccaaccttgcgcctcaacccatttcgtcaaacgtttacctttgctgttgccgccgcgtgcaatatcaacctgatcgtgccaggaccattcacactccagtcccagttcatgttcgacatgcttaccaaaatgctgcaattgcggcaggtcatcgtgcgtcagggcgaacttccatacggcgttaacttgttgcgccgtttcagccagagaagcgacttgtgtgaaagtcggacgctgttccggcggcagggtttgcgcccagttagatgtgcgaatgacatgcccggtcgggtgctcatagaccattgcatcatcgacatacatcagaccgtgaatgtggtgttcattcagcatctcaatgagttgcagggctttaataacgggcattgggtccgcttccagcacggtttttgcatgataatcatacaaataggtgccattacagcaaatagcaggtgtatccagcgccagcgcctgataaaaaggatgaatagcgacgtgatggcgacctgtgacgatgattaattgatagcctgcttcgcgagcgcgggccagggcttctatgctactaggaagcagggtctttttcggggtcaataaggtgccgtctaagtcgagagcaatcacgcgtgtggtcatggcgtattccagattaaggttaagaattttcgtctgcgcgaatggtacaccgataccactatcggacaaaattctgcgttttaattcagcattcaccgccaaaagcgactaattttagctgttacagtcagttgctaaatgcaaaggagcattcatgaagcaaacagtttatatcgccagccctgagagccagcaaattcacgtctggaatctgaatcatgaaggcgcactgacgctgacacaggttgtcgatgtgccggggcaggtgcagccgatggtggtcagcccggacaaacgttatctctatgttggtgttcgccctgagtttcgcgtcctggcgtatcgtatcgccccggacgatggcgcactgacctttgccgcagagtctgcgctgccgggtagtccgacgcatatttccaccgatcaccaggggcagtttgtctttgtaggttcttacaatgcgggtaacgtgagcgtaacgcgtctggaagatggcctgccagtgggcgtcgtcgatgtggtcgaggggctggacggttgccattccgccaatatcagtccggacaaccgtacgctgtgggttccggcattaaagcaggatcgcatttgcctgtttacggtcagcgatgatggtcatctcgtggcgcaggaccctgcggaagtgaccaccgttgaaggggccggcccgcgtcatatggtattccatccaaacgaacaatatgcgtattgcgtcaatgagttaaacagcagtgtggatgtctgggaactgaaagatccgcacggtaatatcgaatgtgtccagacgctggatatgatgccggaaaacttctccgacacccgttgggcggctgatattcatatcaccccggatggtcgccatttatacgcctgcgaccgtaccgccagcctgattaccgttttcagcgttagcgaagatggcagcgtgttgagtaaagaaggcttccagccaacggaaacccagccgcgcggcttcaatgttgatcacagcggcaagtatctgattgccgccgggcaaaaatctcaccacatcagcgtatacgaaattgttggcgagcaggggctactgcatgaaaaaggccgctatgcggtcgggcagggaccaatgtgggtggtggttaacgcacactaaccgctgatttacccggcgcagtctctcctgcgccggtgtattaacctatctcctgtaacgcgtgtctctggcgttcgacgatattggtccacaaattgtctttatcgtcagtccataaattaatcagcaaggcaaaaaagcgttctgctgctggagaaagtacggcatctttacggcgaattattcccaatgttcgacgtataacgggttccaccaatgggataccaataatgctagaatagggcgcatgaggcattgccaggccaggaagcgcgctaatccccagtcccgcctccaccagtcctaaactcgtgctaagatgacgcacttcgtaaaaccagtccagcttccagggcttgtcggccagctgttgttctatcaacagtcggttgccgctggaggagcgtacgccaatcattttgtaacccactaactcctgccattctacaagctgctttttggccaatggatggtcacgccgacaggccagcacgaacggctcgttgaccagtggggtaaaatcaatggaactatttgtgacgttgttcatgtttatgccaaagtcactttcgttacacagcacgctttccatgcaattattcgtgccttgttccagaatccgcactttaatattgggatacagctcattaaatttaccgattgccagcggtaaaaaataaaatactgcggtcggaatacacgctaacgtcaccataccacgatgataagcattcatatcacgaatattaaaaagcgtttcatcgaatttctttattaattcccgcgcctccgggagcaacctttttcctgcttttgttaacgtaaccttgcgagttgtacgctcaaatagttgaacatgtaaatcttcctccatcttttttattcttcgcgttaatgcaggttgcgtaatattgagtaatttagcggcattgttaaagctactggactctgccagtatgacaaatgccttcatactacttaattcatgcttcattattactccggaaaatggaaggctgctttttgggtggctggccgttaaaaattttaactgcatttagccaacttaaattaatgaaaaaatgttattaatcgttgagctaaagtcattagagatgctttgcccttaatgtaaccatatcgcaataagttatgtttttaaattgagggcattattatgaaaaaaataccctgcgtgatgatgcgaggtggaaccagcaggggcgcgttcctgttagcggaacatttacccgaagatcaaacgcagcgcgataaaatattgatggcaattatgggttccggtaacgatctggaaattgacggtattggcggcggtaatccactgaccagtaaagtcgccattattagccgttccagcgatccgcgtgctgatgtcgattatctgtttgcgcaggtaatcgttcatgagcaacgtgtcgataccacgcctaactgcggcaatatgctgtctggtgttggggcattcgccattgaaaatggtttgattgcagcgactagcccagttactcgcgtacgtatccgcaacgtcaatacgggtacgttcatcgaagctgatgtgcaaacgccaaatggtgttgtcgagtacgagggtagcgccagaattgacggcgtaccgggtactgccgcaccggttgcgctcactttcctgaatgccgctggaaccaaaaccggaaaagttttcccgactgataatcagattgattattttgacgatgtcccggtgacctgtatcgatatggcgatgccagtcgtcattattccggctgaatatctgggaaaaacaggttatgaattaccggcggaactggatgccgacaaagcattattagcccgcattgaatctatccgtctacaagcgggtaaagcaatgggcttaggtgatgtcagtaatatggttatccctaaacctgtgcttatttctccagcgcagaaaggcggggcaattaatgtgcgttattttatgccgcattcttgccatcgcgcgctggcgataaccggtgctattgctatttccagtagttgtgcattggaaggcaccgtcacccgacaaatcgtcccttctgtaggatacggcaatatcaatattgaacaccccagtggtgcgctcgacgttcatttaagtaatgaaggtcaggatgccacgacgttacgcgcatctgttattcggacgaccagaaaaatattttccggtgaagtttatcttccctgaaaaaattcgttgtcaggataaggacaatcaataaaggacttctgtatgagtcatacagaaagaacaggattttaaatgaataagaaaagcttatggaagctaattctgatattagcgatcccatgtattattggttttatgccagctccggcaggattaagcgaactggcgtgggtgctttttggtatttacctggcggccattgtggggctggttatcaagcctttcccggaacctgtcgtactgttaattgccgttgctgccagtatggtggtggtcggtaacttatccgacggtgcgtttaaaaccaccgccgtattaagcggttactctagtggtaccacctggctggtgttcagcgcgtttaccttaagcgccgcatttgtgaccaccggtttaggtaaacgtattgcctatctgctgattggtaaaatcggtaacaccacgctgggtctgggttacgttacggtattcctcgatctggtactggctccggcaacaccgtctaacaccgcgcgtgcgggcggcattgtgttaccgatcatcaacagcgtggcggtggctttggggtccgaaccggaaaaaagtccgcgtcgtgtcggacattacctgatgatgtccatttacatggtcaccaaaaccaccagctatatgttctttaccgcaatggcggggaacattctggcgctgaaaatgatcaacgacattctgcacctgcaaattagctggggtggatgggcgctggcagccggattgccgggcatcattatgctgctggtcaccccgctggtgatttacaccatgtatccaccagaaattaagaaggtggataacaaaaccatcgctaaagcgggccttgccgaactaggaccgatgaaaatccgcgaaaaaatgctgctcggtgtctttgtgctggcgctgctgggctggattttcagtaagtctctgggggttgatgaatccaccgtggcaatcgttgttatggcaaccatgctgctgctgggtatcgttacctgggaagacgtggttaaaaataaaggcggctggaataccttaatctggtacggcggtattatcggcttaagctccttattaagcaaagttaaattcttcgaatggttagctgaagtctttaaaaataacctggcatttgatggtcacggtaacgttgctttcttcgttattattttcctcagcattatcgtgcgttatttcttcgcttccggtagtgcctatatcgttgctatgttaccggtatttgccatgctggcgaacgtctccggcgcaccgttaatgttaaccgcgctggcactgttgttctccaactcctatggcggcatggttactcactatggcggcgcggcaggtccggtcatctttggcgtgggttataacgatattaaatcctggtggttggtcggtgcggtactgacgatattaaccttcctggtgcatatcaccctcggcgtgtggtggtggaatatgctgatcggctggaacatgctgtaaatattctcgtcatacttcaagttgcatgtgctgcgtctgcgttcgctcaccccagtcacttacttatgtaagctcctggggattcactcgcttgtcgccttcctgcaactcgaattatttagagtatatccatttattatctttctgcgcacttcacggtgcgcagatatctggagcatttgatgatcaagttatctgaaaaaggcgtgtttctcgccagtaataacgaaataattgccgaagaacatttcaccggcgaaattaaaaaagaagaagccaaaaaaggcactattgcctggtctattctctctagccataatacgtccggaaatatggataaacttaaaattaagtttgatagtttagcctctcacgatattacctttgttggtattgtacagaccgctaaagcgtccggtatggaacgtttcccgctgccgtatgtgctgaccaactgccataacagtctctgcgccgtcggcggcactattaacggtgatgaccatgtttttggtttaagcgcggcccagcgttatggcggtatttttgtgcctccgcatattgcggtcatccatcaatatatgcgtgagatgatggcaggcggcggcaaaatgatcctcgggagtgacagccacacccgttacggtgcattagggacaatggcagtcggtgagggcggcggtgagttggtaaaacagctgcttaatgacacctgggatatcgactatccgggcgtggttgcggtgcatctgaccggaaaacctgcgccgtatgtggggccacaggatgtggcgctggctatcattggcgcggtgttcaaaaacggttacgtcaaaaacaaagtcatggagttcgttggaccgggcgttagcgcgctctctaccgatttccgtaacagcgttgacgtgatgaccactgaaacgacctgtttaagttctgtctggcaaaccgatgaagaagtccataactggctggcgctgcacggtcgcggccaggattactgccagcttaaccctcaaccgatggcgtactacgatggctgcatcagcgttgatttaagcgccatcaaaccaatgattgcgctgccgttccacccgagcaacgtgtatgaaatcgacacactgaaccagaacctgaccgacattctgcgtgagattgaaattgagtccgaacgcgtggcgcacggtaaagccaaactcagcctgctggataaagtggaaaatggtcgcctgaaagtgcagcaggggattatcgcgggctgttctggcggtaactacgaaaacgtcatcgcggcggcgaatgcactgcgcggtcaatcctgtggcaatgacaccttcagcctggcagtttacccgagtagtcagccggtgtttatggatctcgccaaaaaaggtgtggtagcagatttgattggcgcaggcgcaatcatcagaaccgcgttctgcggcccatgctttggcgcgggcgatacgccaatcaacaacggtttgagtattcgccacaccacgcgtaacttcccgaaccgcgaaggctctaagccagctaatgggcagatgagtgcggtggcgttgatggacgctcgttctatcgctgcgactgcggcaaacggtggctatttaacctctgccagcgaacttgattgctgggacaacgtgccggagtacgccttcgatgtaacgccgtataaaaaccgtgtttatcagggctttgtgaaaggggcaactcagcaaccgctgatttacgggccgaacattaaagactggccggaattgggtgcgctgactgacaatatcgtcctgaaagtgtgcagcaagatcctcgacgaagtgaccaccaccgacgaactgattccttccggtgaaacctcttcttatcgtagtaatccgattggtctggcggagtttaccctgtctcgccgcgatcccggttatgttagcagaagtaaagcgactgctgagctggaaaatcagcgtctggcggggaatgtcagcgagctgacagaggtgtttgcgcgcattaagcagattgctggtcaggagcatattgatccgctgcaaactgaaattggcagcatggtctatgcggtgaaaccaggcgatggttctgcgcgtgaacaggcggcgagctgccagcgtgtgattggcggtctggcgaatattgccgaggagtacgcgactaaacgctatcgttctaacgtcatcaactgggggatgttaccgctgcaaatggcggaagtaccaacctttgaagtgggggattacatttacatccctggcattaaagcggcgctggataatccgggtacgacgtttaaaggttatgtgatccatgaagatgcgccggtaacggaaattacgctctatatggaaagtctgactgctgaagagcgcgagattatcaaggcgggtagtttgattaacttcaataaaaaccgtcagatgtaaaaagcgccatgtgaatgtaggtcgcattcggcacttattgtcggatgcgatgcttgcgcatcttatccgacctacgaatcgcatcgaatctgtaggccagataaggcattttcgcagcatccggcacttattgtcggatgcgatgcttgcgcatcttatccgacctacaaatcgcatcgaaccgtaggccggataaggcgtttacgccgcatccggcaaatagttaattgcccttacttcttcgcctctgcaaccactttactacccacgccgcggttattgtattcccacatgcggttgtagttagtgtcattcagattgcgctgtatttcgtcgttatcatctacgctgccggtattacccgcaaacggacgattagagatcaccgcatcggcccacggtttagccgtgttaaaaccttcgttgatggcgctatcacggatcaccacctgaccgttggtattggcatcaacatccaggctgcggcccagttgcgccacaccatcaccgaaagcattgaaacggctgtttacggcgaggaaaccgtagtaaatgttggacagcgtagccggtgcaaacacatacgcttcttgctgagtacgactgttcaccacgcggaattcggtgttatcgaacaccactgcgccgcgaccagaaacgatatccacatccccttcaatgtagctgttggtcaccagcgtacgcggctgacgattcgtttccagacggttctgcacaccgctgttggtgacaaagaaggtgttctgacgaccgagaatgttaacgttgttaatctgtacctggtcaccatcagtacgcagtgccaccgccggatggttacctgcatctacgctatcgcccagcgtgttttcgatggtcagattttgcagttgcaggccattgttttgactccagaagaccgcagagcagagaacaccgatactgtcgctgcgtttgctctggcagctatcgtacatataccacgctggtttacctggcatatatttgccgcgcgggttgacgtcgtgacgccagtcggcagggctcatgccaccatcaagggaaagcccaatcttcacatcaatcggtttttcacctgtaccgtacagagtaattccacccggagcggcagggacatataccgttccctgatactcaccaggcatcacggcaatatactggcgcttgttggtacgcttgataattgccgcatctaccgccgcctgaatcgtggtatgcgttacaccttgagtgcccgccgggccgacaacaaagtcaggttgcgcaggcagggtaatcggggaaggattccacgctgcagcacctggtgtcagggatgcaaaatagtgttgagcatcgaaattctgcgcttcttttgcgctcagaatcgggcgagaagaggtaccaggcgcggtttgatcagaaggacgttgatcgggcggggtactgctacaggcggtcagcgtcacgccaaaagccaatgccagcgccagacgggaaacactaaatgtgttcacaggttgctccgggctatgaaatagaaaaatgaatccgttgaagcctgcttttttatactaacttgagcgaaacgggaaggtaaaaagacaaaaagttgtttttaatacctttaagtgataccagatggcattgcgccatctggcagagtgattaactaaacatcgcagtaatgctggcgcttgccagagagtggaaatgaacgttaaacccgaccatcgcgccgctggcaccttcatcgacatcaatacgttctatatccagcgcgtgaacggtaaaaatgtagcgatgagtttcgcctttcggcggtgctgcgccatcgtacccggttttaccaaagtcggtacgcgtctgcaaaacgccgtctggcattgctaccagaccagagccaaacccttgcggtaatacgcgggtatcagcgggtaagttaacaactacccagtgccaccagccggagccggttggcgcatccgggtcgtagcaggtgacaacaaaacttttcgttcccgcaggaacatcatcccacgccagatgcggactaatattatcgccatcgtaacccatgccgttaaagacatgacgatgcggcaatttatcgccatcgcgcagatcgttactgatgagtttcatgaaccctcctttcttgtttgcagaaagtgtagccagaaaccctcacgcggacttctcgttattggcaaaaaaatgtttcatcctgtaccgcgcggttaaccgctgcggtcagacgctgcaactgttgcgggagaataatatagggcggcatcaggtaaatcagtttgccaaaaggccggatccagacaccctgttcgacaaagaatttttgcagcgccgccatattcaccggatgagtggtttcgaccacgccaatggcccccagtacgcgcacatcggcaaccatttcggcatcacgggcgggggcaagttgctcgcgcagctgtacttcaatatccgccacctgttgctgccagtcgccagattcgagaatcgccaggctggcgtttgctgccgcgcaggccagcggattgcccataaaagttggcccatgcataaagcaaccggcttcaccgttactgatggtttctgcaacctcgcgcgtggtgagtgtggcggaaagggtcattgtgccgccggttaaggctttaccgaggcacaaaatgtccggcgcgatttctgcatgttcacaggcaaacagtttcccggtacgaccaaatccagtggcgatctcgtcggcaatcagcaagataccttcgcgatcgcatattttgcggattcgttttaaccattccggatggtacatgcgcatcccgcctgcgccctggacaatcggctcaatgatcaccgccgcgatttcatgacgatgcgccgccatcaggcgggcaaagcccaccatatcgcgctcatcccattcgccatccatgcggctttgcggggcgggagcaaacaggttttctggcaggtagcctttccacagactgtgcatactgttatccggatcgcacacgctcatcgcgccaaaggtatcgccatgataaccattgcggaaggtcagaaaacgctggcgcgcttcgcctttggcttgccagtactgcaacgccattttcatcgccacttccaccgctacggaaccggagtccgcgagaaaaacgcactccagcggttgcggcgtcatcgccaccagtttgcggcacagctcaatggctggcgcatgggtgataccgccaaacatcacatggctcatggcatcaatttggctcttcatcgccgcattaagctgcgggtgattgtagccgtggatcgccgcccaccaggagctcataccgtcaaccaggcgtctgccgtcagacaaaatcagctcgcaaccttcggcgctcaccaccggataaaccggcagaggggaggtcatggatgtgtatgggtgccagatatggcgttggtcaaaggcaagatcgtccgttgtcataatcgacttgtaaaccaaattgaaaagatttaggtttacaagtctacaccgaattaacaacaaaaaacacgttttggagaagccccatggctcaccgcccacgctggacattgagccaagtcacagaattatttgaaaaaccgttgctggatctgctgtttgaagcgcagcaggtgcatcgccagcatttcgatcctcgtcaggtgcaggtcagcacgttgctgagcattaagaccggagcttgtccggaagattgcaaatactgcccgcaaagcagccgctacaaaaccgggctggaagccgagcggttgatggaagttgaacaggtgctggagagcgcgcgcaaagcgaaagcggcaggaagcacgcgcttctgtatgggcgcggcgtggaagaatccccacgaacgcgatatgccgtacctggaacaaatggtgcagggggtaaaagcgatggggctggaggcgtgtatgacgctgggcacgttgagtgaatctcaggcgcagcgcctcgcgaacgccgggctggattactacaaccacaacctggacaccagcccggagttttacggcaatatcatcaccacacgcacttatcaggaacgcctcgatacgctggaaaaagtgcgcgatgccgggatcaaagtctgttctggcggcattgtgggcttaggcgaaacggtaaaagatcgcgccggattattgctgcaactggcaaacctgccgacgccgccggaaagcgtgccaatcaacatgctggtgaaggtgaaaggcacgccgcttgccgataacgatgatgtcgatgcctttgattttattcgcaccattgcggtcgcgcggatcatgatgccaacctcttacgtgcgcctttctgccggacgcgagcagatgaacgaacagactcaggcgatgtgctttatggcaggcgcaaacagcattttctacggttgcaaactgctgaccacgccgaatccggaagaagataaagacctgcaactgttccgcaaactggggctaaatccgcagcaaactgccgtgctggcaggggataacgaacaacagcaacgtcttgaacaggcgctgatgaccccggacaccgacgaatattacaacgcggcagcattatgagctggcaggagaaaatcaacgcggcgctcgatgcgcggcgtgctgccgatgccctgcgtcgccgttatccggtggcgcaaggagccggacgctggctggtggcggatgatcgccagtatctgaacttttccagtaacgattatttaggtttaagccatcatccgcaaattatccgtgcctggcagcagggggcggagcaatttggcatcggtagcggcggctccggtcacgtcagcggttatagcgtggtgcatcaggcactggaagaagagctggccgagtggcttggctatagccgggcactgctgtttatctctggtttcgccgctaatcaggcagttattgccgcgatgatggcgaaagaggaccgtattgctgccgaccggcttagccatgccagtttgctggaagctgccagtttaagcccgagccagcttcgccgttttgctcataacgatgtcactcatttggcgcgattgcttgcttccccctgtccggggcagcaaatggtggtgacagaaggcgtgttcagcatggacggcgatagtgcgccactggcggaaatccagcaggtaacgcaacagcacaatggctggttgatggtcgatgatgcccacggcacgggcgttatcggggagcaggggcgcggcagctgctggctgcaaaaggtaaaaccagaattgctggtagtgacttttggcaaaggatttggcgtcagcggggcagcggtgctttgctccagtacggtggcggattatctgctgcaattcgcccgccaccttatctacagcaccagtatgccgcccgctcaggcgcaggcattacgtgcgagcctggcggtcattcgcagtgatgagggtgatgcacggcgcgaaaaactggcggcactcattacgcgttttcgtgccggagtacaggatttgccgtttacgcttgctgatagttgcagcgccatccagccattgattgtcggtgataacagccgtgcgttacaactggcagaaaaactgcgtcagcaaggctgctgggtcacggcgattcgcccgccaaccgtacccgctggtactgcgcgactgcgcttaacgctaaccgctgcgcatgaaatgcaggatatcgaccgtctgctggaggtgctgcatggcaacggttaataaacaagccattgcagcggcatttggtcgggcagccgcacactatgagcaacatgcagatctacagcgccagagtgctgacgccttactggcaatgcttccacagcgtaaatacacccacgtactggacgcgggttgtggacctggctggatgagccgccactggcgggaacgtcacgcgcaggtgacggccttagatctcagcccgccaatgcttgttcaggcacgccagaaggatgccgcagaccattatctggcgggagatatcgaatccctgccgttagcgactgcgacgttcgatcttgcatggagcaatctcgcagtgcagtggtgcggtaatttatccacggcactccgcgagctgtatcgggtggtgcgccccaaaggcgtggtcgcgtttaccacgctggtgcagggaagcttacccgaactgcatcaggcgtggcaggcggtggacgagcgtccgcatgctaatcgctttttaccgccagatgaaatcgaacagagcctgaacggcgtgcattatcaacatcatattcagcccatcacgctgtggtttgatgatgcgctcagtgccatgcgtagcctgaaaggcatcggtgccacgcatcttcatgaagggcgcgacccgcgaatattaacgcgtagccagttgcagcgattgcaactggcctggccgcaacagcaggggcgatatcctctgacgtatcatctttttttgggagtgattgctcgtgagtaaacgttattttgtcaccggaacggataccgaagtggggaaaactgtcgccagttgtgcacttttacaagccgcaaaggcagcaggctaccggacggcaggttataaaccggtcgcctctggcagcgaaaagaccccggaaggtttacgcaatagcgacgcgctggcgttacagcgcaacagcagcctgcagctggattacgcaacagtaaatccttacaccttcgcagaacccactagcccgcacatcatcagcgcgcaagagggcagaccgatagaaagtttggtaatgagcgccggattacgcgcgcttgaacaacaggctgactgggtgttagtggaaggtgctggcggctggtttacgccgctttctgacactttcacttttgcagattgggtaacacaggaacaactgccggtgatactggtagttggtgtgaaactcggctgtattaatcacgcgatgttgactgcacaggtaatacaacacgccggactgactctggcgggttgggtggcgaacgatgttacgcctccgggaaaacgtcacgctgaatatatgaccacgctcacccgcatgattcccgcgccgctgctgggagagatcccctggcttgcagaaaatccagaaaatgcggcaaccggaaagtacataaaccttgccttgttgtaaccattctgtatttggttaaattgcgagcgagatcgcgtcttcgattgactgcaatttaaccaattaaattctaaaataatcacgaaaaaaattttacttccgcctcatgcggcgaatgtgggaattgcccaggcggcgggggataggggctggagacagttatccactattcctgtggataaccatgtgtattagagttagaaaacacgaggcaagcgagagaatacgcggcttgcacgcgaattggcgttaaagacggctcaaagaaatatcttttattttttaactggttagataaatgcaatggcagtcactgaacaggcatctcttgccataaaactgtcatcactcatcttgacaaatgttaaaaaagccgttgctttggggataacccggtaaggccggagttttatctcgccacagagtaaattttgctcatgattgacagcggagtttacgctgtatcagaaatattatggtgatgaactgtttttttatccagtataatttgttggcataattaagtacgacgagtaaaattacatacctgcccgcccaactccttcaggtagcgactcatgagtaaaccgttcaaactgaattccgcttttaaaccttctggcgatcagccagaggcgattcgacgtctcgaagaggggctggaagatggcctggcgcaccagacgttacttggcgtgactggcagtgggaaaaccttcaccattgccaatgtcattgctgaccttcagcgcccaaccatggtacttgcgcccaacaaaacgctggcggcccagctgtatggcgaaatgaaagagttcttcccggaaaacgcggtggaatatttcgtttcctactacgactactatcagccggaagcctatgtaccgagttccgacactttcattgagaaagatgccagcgttaacgaacatattgagcagatgcgtttgtccgccaccaaagcgatgctggagcggcgtgatgtggttgtggtggcgtctgtttccgcgatttatggtctgggcgatcctgatttatatctcaagatgatgctccatctcacggtcggtatgattatcgatcagcgcgcgattctgcgccgactggcggagctgcaatacgctcgtaatgatcaagcattccagcgtggtactttccgcgttcgtggcgaggtgatagatatcttcccggcagaaagcgatgacattgcacttcgcgtggaactgtttgacgaggaagtggaacgattgagcttatttgacccgctgaccgggcagattgtttccactattccacgttttaccatctacccgaaaacgcactacgtcacaccgcgcgagcgcatcgtacaggcgatggaggagatcaaagaagagctggccgccagacgcaaagtgctgttggaaaacaacaaactgctggaagagcagcggctgacccagcgtacccagtttgatctggagatgatgaacgagctgggctactgtagcgggattgaaaactacagccgcttcctctccggtcgtggaccgggtgagccaccgccgacgctgtttgattacctgcctgccgatgggctgctggtcgtcgatgaatctcacgtcaccattccacaaattggcggcatgtatcgcggtgaccgggcgcgtaaagagacactggtggagtacggcttccgcctgccaagtgcgctggataaccgtccgcttaagtttgaagagttcgaagcattagcgccgcaaaccatctatgttagcgcgacgccgggtaattacgagctggaaaaatccggcggcgatgtggtggatcaggtggtgcgtccaaccggattgcttgacccgattatcgaagtgcggccggtggcgacacaggttgatgatcttcttagcgagattcgtcagcgagcggcaattaacgaacgcgtactggtcaccacactgaccaagcggatggcggaagatcttaccgaatatctcgaagaacatggcgagcgcgtgcgttatcttcacagtgatatcgacaccgtcgaacgtatggagattatccgcgacttgcgtctgggtgagttcgacgtgctggtagggatcaacttactgcgcgaaggtctggatatgccggaagtgagcctggtggcgatcctcgacgctgacaaagaaggcttcctgcgttccgaacgtagcttgatccagaccattggtcgtgcggcacgtaacgttaacggtaaagcgattctctacggcgataagatcaccccaagtatggcgaaagcgattggcgaaaccgaacgtcgccgtgagaaacagcagaagtacaacgaggaacacggaattacgccgcaaggcttgaacaagaaagtggtcgatatcctggcgctggggcagaacattgccaaaaccaaagcgaagggcagaggaaaaagccgcccgattgttgagccggataatgtgccgatggatatgagccctaaagcgttgcagcagaaaatccatgagctggaagggttgatgatgcaacacgcgcagaatctggagttcgaagaagcggcgcaaattcgtgaccagttgcatcagctgcgtgagctgtttatcgcggcaagctaacaggatagcgaagaagactgatgacaaacggaaaacagcctgatgcgctacgcttatcaggcctacattttctccgcaatatattgaatttgcgcggtttgtaggccggataaggcgttcacgccgcatccggcataaacaacgcgcactttgtcttcaataggaagccggaattttccttcggatttccgttaacctaaagcctgtaacgccttttccagcgcgttatgtaacaactggcggtcatgacgatacggaatatcgctggcctccagtacctcctggatcacaatccgctctttcaccgcgctgacatccacttttggcccgacgatgaccgcatcaatgacctttttaccaacatactgctccataattgccagcttgctttccagcttcaaattagccgcaggtaaactcaactcacgccccagattgccgatataaaccatcggcgctggcgtgcggcgtaatgcctgggcgatttccttcagcagcagaattggcatcaggctggtataaaaactgccaggcccaataatgatgagatccgcttcattgatagcgtgaaccgcctcacgcgttgcgggtacattaggcgttaacaataactcttgaatcggcgtagttaactggtcgatattgacctcgccgtaaacttcatgcccctgatcgtcaatcgccatcagatcaacaggatgctcactcattggaatcaaatgcgtatccactttcagcagattacgaattaaattgatggcttccagaggccgcacgctaaggtgatccagcgcctttaacatcaagtttccgagattatgaccggaaagttcgccattgccaccaaaacggtattcaaacatcgcggaggcgacgctcggttccgttatcagctggttgaggcagttgcgcatatcgccccaggcaatgccgccttcactacggcgaatacgccccgtgctgccaccattatcggtggtggtgacgatacccgttaaacgagaacccaaagagctaagactactgagaacgcgtcccagtccatgccctccgccgagagcaacgacacgatcaagatcagccagcgtacgattgcgcatatagtttcctggagtcagattatccgcgctacagtagcgcaaattgcggggaaacagcaattaacctgccaatattgaggatacaaactattttcttctacctctaaaggacgatgcacgctatgcctccctgatgatgtatatcaaagtaaaaccgccattttcccttattctgtagcgaaatagcacgatcatgacgctatatacatgattacatagcgaaagtgtggatggtaaaaatctcatttacacgctagtatcggcataaccactaaacactctagcctctgcacctgggtcaactgatacggtgctttggccgtgacaatgctcgtaaagattgccaccagggcgaaggaagaaatgacttcgcctcccgtatctggaaaggtgtacatggctagtcaactgactgatgcatttgcgcgtaagttttactacttgcgcctgagcattaccgatgtgtgtaactttcgttgcacctactgcctgccggatggctacaaaccgagcggcgtcaccaataaaggctttcttaccgtcgatgaaattcgccgggttacgcgcgccttcgccagactgggcaccgaaaaagtgcgcctgacaggaggagagccgtctttacgccgcgactttaccgatatcatcgccgctgtgcgggaaaacgacgctatccgccagattgcggtcacaaccaatggttaccgtctggaacgcgatgtggcgagctggcgcgatgcgggacttactggcattaacgtcagtgtcgacagtctggacgcccgccagtttcacgctattaccgggcaggataaattcaaccaggtcatggcagggattgatgctgcatttgaggccggttttgagaaggtcaaagtcaataccgtgctgatgcgtgatgttaatcatcaccagctcgacacctttctgaactggatccagcatcgccctatccagctgcgtttcatcgaactgatggaaacgggcgagggcagcgagctcttccgtaagcatcacatctctggtcaggttctgcgtgacgagctactgcgtcgcggctggatccaccaattacgtcaacgcagcgacggtcccgcgcaagtcttttgccatccagattacgccggagagattggccttatcatgccgtatgaaaaagacttctgcgccacttgcaaccgcctgcgcgtttcctccattggtaaactccatctctgcctgtttggtgaaggcggcgttaacctgcgcgatctgctggaagacgatacccagcaacaggcgctggaagcgcgtattagtgcggcgctgcgggagaagaaacagacccatttcctgcatcaaaacaacaccggtattacgcaaaacttaagctacattggcggctaaaacgtcaaaaggagagatcagatgagtcaggtaagcactgaatttatcccgacccgtattgctattcttacggtttctaatcgtcgcggtgaagaagacgatacctccggtcactatctgcgcgatagcgcgcaagaagcgggccatcacgttgtcgataaagccattgtgaaagaaaaccgctacgctattcgcgctcaggtatctgcgtggatcgccagcgacgatgtacaagtggtattgattacgggtggtactggcctgacggaaggtgatcaggctcccgaagcattgctgccgttgttcgaccgtgaagttgaaggttttggtgaagtgttccggatgttgagctttgaagagattggcacttccacgttgcaatctcgtgcggtagcgggcgtcgccaacaaaacgctgattttcgccatgccgggtagcaccaaagcgtgccgtaccgcatgggaaaatatcatcgcgccgcagctggatgcccgtacgcgtccgtgtaatttccatccacatttgaagaaataagtatgagccaactgacccatatcaacgccgctggcgaagcgcacatggtggatgtctccgccaaagcggaaaccgtgcgtgaagcgcgggcggaagcctttgtcaccatgcgcagcgagacgctggcgatgattattgatggtcgccaccacaaaggcgacgtatttgccactgcgcgtattgccggtattcaggcggcaaaacgcacctgggatctgatcccgctctgtcatccgctgatgctcagcaaagttgaagtcaatttacaggccgagccggagcacaatcgggtgcgtatagaaaccttatgccgcctgaccgggaaaaccggtgtcgaaatggaagcattaaccgcggcctccgtggcggcgctgaccatttatgacatgtgcaaagcggtgcaaaaagatatggtgattggtccggtacgtttgctggcgaagagcggcggcaagagcggtgactttaaggtggaagcggatgattaaagttctttttttcgcccaggtgcgcgagttggtgggaacagatgcaaccgaagtggctgcggatttcccaactgttgaagcgttacgccagcacatggctgcgcagagcgatcgctgggcgctggcgctggaagatggcaaattactggctgccgtcaaccagacgctggtgagttttgaccatccgctgactgacggcgacgaagtagctttcttcccgccggtaaccggaggttaagatggcagaaaccaaaattgttgttggtccgcagccgttcagcgtaggagaagagtacccgtggctggcggagcgtgacgaagacggtgcggtagtcacctttactggtaaggtgcgcaaccataacctgggcgacagcgtcaacgcattaaccctcgaacactatccggggatgactgaaaaagcactggcagaaattgttgatgaagcgcgtaaccgctggccgctggggcgcgtcactgtgattcaccgcatcggggaattatggccgggcgatgaaatcgtttttgtcggtgtcaccagtgcgcatcgcagcagtgcgtttgaagccgggcagtttattatggattatctcaaaacccgcgcaccgttctggaagcgcgaagccacgccggaaggcgaccgctgggttgaagctcgggagagcgatcagcaggcggcaaaacgctggtaattttttgttagccggataaggcaccgctgcgtccggcaatttcaccgctcagtacatacgtttacgctgcgtcgatgcacagcctcatcattttgcagtatccttaagatattccttatatcttcaggagatcgtcatggacagattcccacgttctgatagtatcgtacaaccccgggctggcttgcaaacttatatggctcaagtctatggctggatgaccgttggcttgttgctgaccgcatttgttgcctggtatgcggctaattccgcggccgtgatggagctgttgttcactaaccgtgtctttttaatcggtctgatcatcgcgcaattagcattggttattgtgttaagtgcgatgattcaaaagctgagcgcaggtgtaacgacgatgctctttatgctttatagcgcgctgacgggtcttacgctttccagtatattcattgtctataccgctgcttctatcgccagtactttcgtcgttactgccgggatgttcggcgcaatgagcctgtacggttacaccacgaagcgcgatttaagtggctttggcaatatgctgtttatggcgttaatcggcattgtgctggcaagcctggtcaacttctggttgaaaagcgaagcattgatgtgggcagttacctacatcggcgtgattgtctttgtcggattgacggcgtatgacacgcagaaactgaaaaatatgggtgagcagattgatacccgcgacacgagcaacctgcgcaaatattccattcttggcgcgttaaccttgtatctggacttcatcaacctgttcctgatgttgttgcggatcttcggcaaccgccgttaattctttttcaccatcactatcccggccatgtgtcgggatttttttcttactaaaaacgacacttaacaagtaccaggtataaaatatgccttatggacgagcggaagcgttttctgtatccataaatgcaaaagtattttgtatgcgtggttttaaatttattgatggtgaatattaatattttttctaaggataactaaaagaatggaaagttacagccaaaacagcaataaattagattttcagcacgaggccaggatattaaacggtatatggctcattaccgctttaggtttggtggcaaccgcaggactagcctggggagctaagtatatcgaaattacggcaaccaaatatgatagtccaccaatgtatgtcgccatagggttattattactttgtatgtatggcttaagtaaggatatcaacaagataaatgccgccatcgcgggcgtaatatatctgtttttactctctttggtggcgattgtcgttgcaagtttagttcctgtatatgccattatcatcgtgttcagcactgcgggcgcgatgtttttaatcagtatgctggccggtttattatttaatgttgatcctggttctcaccgttttatcattatgatgacgttgacagggttggccctggtaatcatcgtgaatgcggcattaatgagtgaacggcccatttggataataagttgcttaatgattgtgttatggagtggcattatcagccatggacgaaataagctccttgaattggcggggaaatgccatagtgaagagttgtggagtccggttcgttgcgcttttacaggtgcattaacactctattactattttatcggcttctttgggatacttgccgcgatagctataacgcttgtctggcaaaggcatacgcgtttttttcattaaccgtaaatgcacatactaaagaacttaactaaacttcacatcgccgcttcatttttcgcccgtagcttcttcgcctggctttccagcaacaggtaacagatcagcgccagcagcagtgggataaagtaatacagcacacggtaagcgagtagggcggcgataattgtacctttggaggtatgctccccagccagtagtgcgataaacaccgcttccagcacaccgatccccgccggaatatgcacgatgacgccagcaatactactaaccagtaacacgcccagtacaaagaaatagttcacgctttgaccaagtaacagccagataatcgcccccattaccatccagttaacgctggaaatcagcatctgagcgagggcgaatttccaactaggcagcaccagcttttgccctttgatggtcatatggcggtgcttcgcgaaagcgcaaaaccacaaataaaccgcgataatcatcagtaagccaatgccgagaatacgcagcgtagtttgatcgacataccagtgatccggcaactccaccacgcctgcggtaaagataatccctgccagtaaaatgtagcccagccagttggtggtaatactgaggctgaaaatccgcgtaatagtgctaccgggcaaccccagacgagagtacaaacgatagcgcataccaatgccgccgacccaggtactgagcgtcaggttgaaggcgtagcagataaagctcaccagcatcacctggcgcttcgccagtttgtgaccgcagtaaaagcgggcgagcaggtcatagcagccgtaaatcagatagctgacgaccaccagcccgaccgcactaagcagcgcaacgcgattgtagtcgcggatgaccttccagacctcttcccagtccacttttttggcgtagaccaccagcaacacaatcaccgcgataaaaaacagccaggtgaggatcttctttgctaagcgccagcgcgggtgacttttactcatcagggttttacccccgtgttttcagtttctacccgatcctgcgtttccattgtcggttgtgcgggcggatcaacctgcgccagacgtggcgtgtgtgccggaagccagccaaccagcgccgggaagtggcgtaaaaagtggaacgccagcacgcttttggtcaggttccaccaggtgcgtttgggcagcatggtttcatccacctgctgacaatctgcggcaataatgccgttcagattatcgcgcagcgtctggttaaaatgacgatcgtggatgatgacatttgcttcgagattcagactcaaactgagcggatcgagattactggaccctactgtcgcccagtgatcgtccatcaatgccactttgccgtggagcgggcggcggcggtactcaaaaacctgaacgccgcctttaaccagatagttatacagcaagcgcgcaccgactctgacaatcggcatatccggttcgccctgaatgatcagtttgatccgcaccccgcgccgtgccgctttacgcaaggcgtgtaaaaatcgatagccggggaagaagtaggcgttggcgataatcacttcccgccgcgcctgagtgagcattttcaaataatggcgttcaatatcatcgcgatgttcttcgttatcgcgccagaccagcaatacctgcgcttctcccggctggcggttctcttccgctttgtgatgacgtcgccaccagcgtcgtgccgcgctctgtccaggcaggttttccagctcaaactggagaatatcttcgacaatcggcccttcaaggcgtaccgcgtaatcctgtttagcctctggaccgtagctggacatatgctcggcggagtaattcagcccgccaataaaggctatacgcgcgtcgatcaccacaattttgcgatgcatccggcgaaacacattggtgcgcataccaaaaaggcgagggcggggatcgtagtagcggaacactacgccagctgccgtcagttcattgacaaactcatcgctgagatccgggctaccgtagccatccagcaagacttccgctttaaccccgcgttgcgctgctgccagtagtgccgcatgcagttgtttgccgacgtcatcctcaaaccagataaacgtttcaagaatgatgcgttcttgtgcctcgccaatcgccttaaacaccgcgggataatattgctcgccgttttccagcaactggatcttattgccttcgcgccagctacatttcataaatgaatctccgcacttaaaggggcatgatcagaaaggtgtcgccatgtccgcagcggcaacgcggttggcgcgctggcgctggcatttttgacgtagatcctgtccagtcgtagtagaggaaattgcaccggaaacgtgcgcgccgggcgtccgtgggcgcgggtaaaaatctcatccagtccggcctgcacttttaacggatgattagctttttgccgccagtcattgaaatcacccgccaccaataccggttcgccgtccggtagctcattcacccattcggcgagcatcgcaagctgcgcctgacggtgcgcctcacgcaggcccagatgtacgcacatcacatgaatcgcttttccggtcatcggcggcacaatgcggcagtagagcacgccgcgcttttccgcaccatcgacgctaacatcgcgattctcataatgttcaatgggataacggctcagtacggcgttgccgtgatgcccttccgggtatacggcattgcgaccgtaggcaaaatcgctccacatagtgtcggcgagaaactcgtagtggctggtatcgggccagttttccacatgcagcggatgaacttcgtgcgcgcccatcacttcctgcaggcaaacaatatcggcgctgacggtacgcacggcgtcgcgaagttccggcaaaatgaagcgtcggttaaacgcggtaaagcctttgtgaatattgatggtgagcaccttgaagctaaattgttgtgtttgatcgggcataattttcctgtctttgcctcttatctcattgaaatagtgtagtcggcgtcacaaaaaggtgcggtcttacggaattttccgtaaagttcggtactctgagtaagtagagataaattcttcaggagagaagccatgaagtggcaacaacgtgttcgtgtcgcaacgggtctaagttgctggcagattatgttgcatttactggtagtggcgctgctggtggtgggctggatgagtaagactctggttcacgtcggcgtgggattatgcgcactgtattgtgtcacggtagtgatgatgctggtgtttcagcgccaccccgagcaacgctggcgtgaggtggcagacgtgctggaagagctgaccacgacctggtattttggcgcagcgctgattgtgctgtggctgttgtcccgcgttctggaaaacaactttttgctggcaattgcagggctggcaatccttgccggcccggcggtagtgtctttgctggcgaaagataagaagttacatcaccttacgtctaaacatcgcgtacgccgctgattacatcaccttacgtctaaacatcgcgtacgccgcactccctgtcgtggccgttatcaccagtagcggccacaaactattccacacaatatccagactcgcatccttcaaataaatctgcttggtaatgtccgtaaagtggcgaatagggttaatccacgtcaggttttgcagccataccggcatgttttccaccggagaaacgtaaccggaaaggagaatggcgggcatcataaagacaaacacgccgataaacgcctgctgttgtgtactacagagactactaatcaacagaccgaatcccaccaggcttaaaccataaatcaccatcgtaaagtagaacagcgccaggcttccggcgaaggggatttgatacgcccagataccaatcgccagcacaatggtggcctggaaggtggcgacaattaacgccggtacggctttgccgatgaagatctgccaggtggtgagcgggctaaccagtagctgatcgagcgtaccttgttcacgttcgcgggcgacggaaagactagtgacgatcattacgccgatagtggtgatcatggcgatcagactcggcaccacaaaccatttgtagtcgagattcgggttataccagttgcgtaccaccagctcgctgttgttaggtttcggttttccttccagcagctcctgctgataatttttgacgatctgttgcaggtagttggcggcaatttgcgcactgttggagttacgcccgtcgaggatcaactgcaaaggcgcggtctggaaggtatccagtttgcggctgaagtcagccgggaaacgcaccagtagtaacgccttttgtgtgtcgatggttgggcggatctcctgtgggcttttcagcagcagcacatgagtaaaggcgctggcgcgggcaaaacgttgggtcagctccacgctatgctcgccgttatcttcatcgtagatggcgatggtggcgttagtcacttccagcgtggcggcgaacgggaacaggatcacctgaattagcacgggtaaaatcagaatcgcgcgggtttgcggttcgcgcagcaagctctgcaactctttgcggattaacgtccataagcgatgaaacatgctcttctccttaatccagccgacgtttggttttcagccacgtcaggccgataaacatcaccgcgctagcgatcaaaaacagcacgtttaccaccagcaccactggaatattcccggcgaggaacaggctttgcagggtgctgacgaaataacgagcgggaataatgtacgtcaccgcgcggatcaccgcgggcatactgtcgatctgaaaaataaagccggaaagcataatgctcggcagaaaagcggcgttcagggcgacctgagcggcattgaactggttgcgggtaatcgtggaaatcagcagccccatccccagggtactgagtaaaaacaggctggagataaaaaacagaatcagcaggctcccgcgatacggcacgccgagaataaacacactcaccagcatacacagcaacatcgccagcatcccgagaaagtaataagggatcagcttacacagcagcagttccgtgcgggtaatctccgtagagagcagagcctccatggtgccgcgttcccattctcgcgccaccaccaggctggtgagaatcgcgccgatgaccgtcatgataatggtcaccgcaccggggataatgaagtgctggctaatcgccgccgggttaaaccagtagcgggtttgtacatcaataagcggttcaaaagtctgcccgttgtcctccgctcgctgcatttgccagatctgccagatcccttcgacatacccctgtacaaagttagcggtattcggctcactgccgtcggtgatcacctgaatcggtgcggtggcgttggcgcgctccatctgttccgcaaaatccaccggaataaccaccagaccgcgaattttccccgcctgcattttggcgatcagttcctgacggttatcgctgatggtggcgtcgatgtaggggctaccggtcatggtgtgggtgaaatccagcgccgcttcgctacgctgttccagtaaaatcccgacccgcagcttgctggagtcgaggttaatgccgtaaccaaaaataaacagcagtagcagcgggatcactaccgcaatcagccagctactcggatcgcgaacgatctgccgcgtctctttaacgcacagcgcccgtacgcgacgccaggacaggatcgggttactcattgctatgctccttatcccagtcgtggatcaactgaataaaggcttgctccatggtgggatcgggttgctcatcgttagcgctctgtgctttcaaatcgtccggcgtgccgctggcgattaatttcccgcggtacaccaggccgatgcggtcgcaatattccgcttcatccataaagtgggtggtgaccatcaccgtgacgcctttctctaccatgctgttgatgtgcagccaaaattcacggcgggtgagggggtcaacgccggaagtcggttcgtcgagaaacagaatgtccggttcatgcatcaggctacaggccagcgccagccgctgtttaaaacctaatggcagttcatcggtggcgtgggaggcgatacttttcaggccgaacgcctcgctcatgcgggagattttttcgttctgcgcccgaccgcgtaagccatacacaccagagaaaaagcgtaaattctgttcgaccgtcaggttaccgtagaggctaaatttttgcgccatatagccgagatgctggcgcgctttaccggaactctctttcagatccatccccagcaccagcgcctggccggaagtcggcaccagcaaaccgcacatcatcttaaaggtggtgcttttacccgcgccgtttggccccagcaaaccaaaaatctccccacgtttaacggcaaagttgacgtgatcggtggcggcaaaatccccaaatttcttggtcagttctttcgcttcgatcaccgtctcgccgggtgtgccttctaccgtatgtaatattgcgcccagcgggctttcgctggttccggcaccgcccagcaaatcaataaacgcatcttcaaaacgcggcgtagtttcgttgatgttgatttccggcatcccgtcggcatggcgaatatcgtctggtgtggcctcttttttgaggatcagacgtacgcttttcccctgaatcatgccgtcgctgacctgcggcagtttcaaggcgcgttgcaacagtttgcggttgccctcgtgtggactggtcatcagaaagctgcgtccggccatggtttgtgtcagggcttttggttctccctgatacagcaactcgccttcgttcatcagtaacacgtcacggcactgctcggcttcgtcgagatagctggtactccagaggattaacatcccttcgcccgccagctcatgcaccatctgccacagttcgcgccgactgatagggtcaacgccgacgccgggttcatcgagcagcaacactttcggttcgcccaccagggtacaggccagaccgagtttttgtttcatcccaccggagagcttgcccgccaggcgtccggtaaacggcccaagagacgtaaactccagcaggcgagcaaaagtttgcttacgtgcctcgccggtgacgctgcgcaaatccgcgtacagattgaggttctccatcaccgtgagatcttcatacagaccaaatttctgcggcatataaccgagcacggcgtgcagcgcgccgtcgtttttgatcggatcaaagccaatcaccgtggcactgccgctgtcgggtttcagtaatcccgccaacatccgcatcagcgtggttttacctgcaccgtccggccccaccaaccccgtcacataaccggcgtgaatggtacaatcgagcggcgcgacggcgggcttgtccatgcccggaaagcgtttttccaggccgttcagcgtgataacggcatcattcatgtcctgcctcgtcaccgaattgtaccgtcactggcattccctggcgtaacgcatcatcggcgtcggtcaccacaatacgcaggcgatagacgaggtcggtacgcagatccggcgtttcgacggttttcggggtaaattcagcagtcgggctaacgaaaccaatctgcccgtgatacggcttgtccgggcgaccatcggtataaagcagcactttgcgccccggctgggcctggtcaagattacgttcatcaacataagcgcgcacccacaccggacgcgttagactaacggtaaacaccgtgccaccttcattgaggaccgtgcctggctccaccgcgcgcgttaacagcgtgccatcagacggggctatcaacgtactgtcctgtaaattcaactccgcctgcgccagttgcgcctgcgcctgttcgaggctggctttcgcctgagcgatgtcctgttcacggttaccggaacggtactgacgcaatttatcctgtgcacttttcagcgttgcctgcgcctggtcgcggctggagcgggcattttccaggtcatttgcgctaatagtgcggcttttccacaacccttgctggcggttatagaagttctgcgcatagtcataggcggcttgcgcctgtttcaccgctgcggcggcctgagcgatttcttcattgcgatacccggcaagcatcaggtcatactgcgcctgtgccacgctaacacccgctttcgcctgcatcagggcaatctcatacggcttgtgatccagttcgcccagcacctggcccgctttgatagcatcaccttcgtccaccgccaggctttcaacgcgccccccaacacggaaactaagatttaccgtacgaatatccacgttgccatacagcgtcaggccgttatcctggcggctttgataccaccagtagcctccggcaaccacggcggcaagtaccactaccgccaatccgatcacgacaggttttttcatcactacaaactcctttgcgataattacaaactcctttggcttaatccttgcaaaatcaggtcgatatgacaggtcaccgtctggttgatcagttcggtcttttcttcatcgaacgcggtccagccggtacgtaacagaattgtttctttgccaagacggaacgccagaatctcaccaatcaacgcatgggtatgaaggatcatgcgggtgtcattggcgtcgcagccggtccaggcggcaatcaggcgtgtcaggtggctgtgtagcggactaatcacctgttcgtgcaccaggtggtaggctgccgtgggagagagctgctcacgggagataaacttgctgaggttgacggtgtcatcctgggtgagcagcttaatcatgttcctgcaggcgcgaaggatcagttcacggatggcagcccgatcaggctgtggttgcgcgaacaagcgttcggcttcctcggcatgcggacggaactgctcgccaataaaatcggcaatccactgggcgcaggcgaggtacaaatcttctttgctaccgaagtagtaggtgatggcagcgatattctgcccggcctgggcggctatctcgcgagtggtggcgttcattccatattcaccaaactgcgccagtgcggcagcaatcagctgttttttcgcctgttcacccttgattgtcatggcaggattattcatcgcacagtccattcttaatcaaatgattgattaagattatgactccataggggagttgtccagtatggctaagaattttagcaacgccagtcacagggataatttatgcgctgcgtcacaaaaactgctacactccgctccctcatgacattgtggtttttgtcattttccttttcagtatctccctgaaaactacaccggtaacggtcggggcggttcggagtagttatgtctttcgattctttgggtttaagccctgatatcctgcgcgccgttgccgagcagggttaccgtgaacccacccctattcagcagcaggcgatccctgcggtgctggaaggccgcgacctgatggctagcgcccagaccggcaccggcaaaacagcgggctttacgctgccgctgttgcaacacctgatcactcgccagccgcacgccaaagggcgtcgtccggtacgtgcgctcattcttaccccgacccgtgaactggcggcgcagattggcgaaaacgtccgtgattacagcaaatacctgaacattcgtagcctggtggtgtttggtggtgtgagtattaacccgcagatgatgaaactgcgtggcggcgttgatgtgctggtggcaaccccgggacgtttgctggacctggaacatcagaatgcagtgaagctggatcaggttgaaatcctcgtcctcgatgaagctgaccgcatgctcgacatgggctttatccacgatatccgtcgcgtgttaacaaaactacctgcgaagcgccagaacctgttattctccgcgaccttctctgacgatattaaagccctggcggaaaaactgttgcacaacccgctggaaatcgaagtggcacgccgcaataccgcgtctgatcaggtgacccagcacgttcactttgtcgataagaaacgcaaacgcgaattgctgagccacatgattgggaaagggaactggcagcaggtgctggtgtttacccgtaccaaacacggcgctaaccatctggctgaacagctcaataaagatggcatccgtagtgcggcgatccacggcaataaaagccaaggtgcgcgtactcgtgcgctggctgattttaaaagcggcgatattcgtgtactggtggcaactgacatcgctgcgcgcggcctggatattgaagagctgccgcacgtcgtcaactatgaactgccaaacgtacctgaagattatgtccaccgtatcgggcgtaccggtcgtgcggctgctaccggtgaagcgttgagcctggtgtgtgttgatgaacacaaactgctgcgtgatatcgaaaaactgctgaaaaaagagatcccgcgcattgcgattccgggctatgagccggacccgagtatcaaagccgaaccgatccagaacggtcgccagcaacgtggcggcggcggtcgtgggcaaggtggtggtcgcggtcaacagcaaccacgccgtggggaaggtggcgcaaaatctgcaagcgcgaaacctgcagaaaaaccgtctcgccgcctcggcgatgccaaaccggcaggcgaacaacaacgtcgccgccgtccgcgtaaacctgccgctgcgcagtaatcttttatgccgggctatgcccggcatcaggctgatgaacaaacgcaaaactgcctgatgcgctacgcttatcaggcctacgtgaactctgcaatatattgaatttgcatgcttttgtaggccggataaggcgtttacgccgcatccggcatttcacaacaagcacttgtcagcaatttgagaacacgggaaaaaatttatctgttttaccgcccataagccaccgagacgttacttctctatagccaattgttcgcgcaactccattaaaaggtagcccagtcgattcttgcccttaccatgaccaccgtctccccagtaagcatcgttttccgtatgctcaaccagttttgcgggcgcggttgccagcaagagcgcacgcagttctgcatgctgttcgaatttagcgcgaagtgcttttcgcatcacctgttctttgacgctctcccagtttttacgcagaggcttagaacgatcgcgccccatgcgtgcggcgaccataggggaagaaacccgacggatctcttcgcggtatttttcatcaaggaatttttgtgcctgaaaatagtgttcactggtaggccaggttttcccgtcaaccttgatgggccaggcggcaaagttagaaaaatcaccgtagtcatcgctggtgctgtagaaatttatgatggtgtcttgcatgacgtgttggatcctttgtgctcgaacgggcattaaaccgcattatgttggtggttattgcgagccgctttccagaaacagaaaaaccattacccctgaaaaccgaaaaatgccacaatattggctgtttatacagtatttcaggttttctcatggcattaaccgccgcgcttaaagcgcaaattgccgcctggtataaggcgcttcaggaacagatccccgactttattccccgtgcgccgcagcggcagatgattgcggacgtcgccaaaacgctggccggagaagaagggcgacatctggcgattgaagcccccaccggcgttgggaaaacgctctcttatttgattcccggcatcgccattgcccgcgaagagcaaaaaacgctggtggtgagtaccgccaacgtggcattgcaggatcagatttacagcaaagatttaccgctgctgaaaaagatcattcccgatcttaaattcactgccgcttttgggcgtgggcgctacgtttgtccgcgtaatctgacggcgctcgccagtactgaacccacgcaacaggatctgctggcgtttcttgacgacgaactgacgccgaacaatcaggaagagcaaaaacgttgtgcgaagctgaagggcgatctcgatacttataaatgggatggtctgcgcgatcatactgatatcgctatagatgacgatctctggcgtcgtttaagtaccgacaaagccagctgcctcaaccgcaattgttactactatcgtgaatgcccgttttttgtcgctcgtcgggagattcaggaagcggaagtggtggtggcaaaccatgcgctggtgatggcggcgatggaaagcgaagcggtattgcctgacccgaaaaatttactgctggtgctggacgaaggccatcacctgccggatgtggcgcgggatgcgcttgagatgagcgccgaaatcaccgcgccgtggtatcggctacagctggacttgttcacgaaactggtcgctacctgcatggagcagtttcgcccgaagaccatcccaccgctggcgatccctgaacgtttgaatgcgcattgtgaagagttgtatgagcttatcgccagcttaaacaacattctcaatctctacatgcctgccgggcaggaggcagagcaccgttttgcgatgggcgaactgccagatgaagtgctggagatctgccagcggctggcaaaactcaccgagatgctgcgtggcctggcggagttatttcttaacgatttaagtgagaaaaccggcagccatgacattgtacgtctgcatcggttgattttgcagatgaaccgcgcgttggggatgttcgaggcgcaaagcaaactctggcggctggctagcctggcgcaatcttccggtgcaccggtgaccaaatgggcgacgcgggaagagcgcgaagggcagctacacctctggtttcactgcgtgggaatacgtgtcagcgatcagctggaaaggctgctgtggcgcagtattccgcacattattgtcacctccgcaaccttgcgtagcctgaacagttttagccgtttgcaggagatgagtggtctgaaagagaaagcgggcgaccgttttgtggcgctggattccccctttaaccactgcgaacagggcaaaattgttattccccggatgcgcgttgagccttccatcgacaacgaagagcagcatattgccgaaatggcggcctttttccgtaagcaggtggagagcaaaaaacatctcggtatgttggtactgtttgccagcggacgggcgatgcagcgctttctcgactatgtgacggatttacgtctgatgttgctggttcagggcgatcagccgcgttaccgtttagttgaactgcaccgcaaacgcgtcgccaacggtgagcgcagcgtgctggtgggcttacagagttttgccgaagggcttgatttgaaaggtgatctgctcagccaggtgcatatccacaaaatcgcttttccgcccatcgacagcccggtggtgatcaccgaaggggaatggctgaaaagcctcaaccgctatccgtttgaggtgcaaagcctgccgagcgccagctttaacctgattcagcaggttgggcgactgattcgaagccacggttgctggggcgaagtggttatctacgacaaacgcttgctgaccaaaaattatggcaagcgactactggatgcattaccggtatttccgatagagcaaccggaagtccctgaaggtatagttaaaaagaaagaaaaaacgaaatccccacgccgtcggcggcgttaatgatgtgagtcaggtaaggagtcgtaaatggactatcgcaaaatcattaaagagatcgggcgcgggaaaaaccacgcgcgcgatttagaccgggatactgcgcgcggtctgtatgctcatatgctcaatggtgaagtccctgaccttgagttgggcggcgtattgattgcgctgcgtatcaaaggagaaggggaagcagagatgctcggcttttacgaagccatgcaaaatcacaccatcaagctgacgccgccagcaggcaagccgatgccgattgtcatccccagttacaacggcgcgcgtaaacaggccaacctgacgccgttgttggcgattctcctgcacaaactcggttttcctgtggtggttcacggggttagcgaagatccaacccgcgtgctgactgaaaccatttttgaattgatgggtattacgccaacgttgcacggcgggcaggcgcaggcgaagctcgacgaacatcaaccggtgtttatgccagtcggcgcgttttgcccgccgctggaaaaacaactggcgatgcgctggcggatgggcgtgcgtaacagtgcacataccctggcgaaactggcgacgccatttgccgaaggtgaggcgctgcgtctttccagcgttagccatccggaatacattggacgcgtcgcgaagttctttagcgatatcggcgggcgggcgctactaatgcatggtactgaaggtgaagtgtatgctaatccgcagcgctgcccgcagatcaatctcattgaccgtgaagggatgcgggtgctgtatgaaaaacaggacactgctggtagcgagttactgccacaagcaaaagatccggaaaccacggcgcagtggattgagcgttgccttgctggcagcgaaccgattcccgaaagcctgaaaatccagatggcttgctgcctggtggctacgggtgaagcggcaactatcagcgacggcctggcgcgcgttaatcaggcattttaattcttttctcagccggatgagccatgtcatccggcttttaccccaccgcaatatgaaattcctgcatctttattgaccttcccacgcccggcgtgcagcataaaaatacaacaaacacataacataaacaggagttaaccatggaaagtggtcatcgctttgatgctcagacgctgcacagttttattcaggctgtatttcgtcagatgggtagcgaggaacaagaagcgaaattagttgccgatcatttaatcgcggcaaacctggcagggcatgatagtcatggtattggcatgatcccaagctatgtacgctcctggagtcaggggcacctgcaaattaaccatcatgccaaaaccgttaaagaggcgggggcggcggtcacgctcgatggcgatcgcgcatttggtcaggtcgcggcacatgaagcgatggcgctggggattgagaaagcgcatcagcacggtattgccgccgtggcgctacataacagccatcatatcggccgtatcggttactgggcggagcagtgtgcagcggcggggtttgtctctatccactttgttagcgtggtcggtattccaatggtcgcgccgttccacggtcgcgacagccgctttggcaccaatccgttctgtgtggttttccctcgtaaagataatttcccgctgttgcttgattacgccaccagcgccattgcatttggcaaaacccgcgtcgcctggcataaaggcgtccccgtgccgccaggttgcctgattgacgttaacggcgtgccgacgaccaatccggcggtaatgcaggagagcccgttgggtagcctgttgacctttgccgaacataaaggctacgcccttgcagcgatgtgtgaaattcttggcggggcgctttccggcggtaaaacgacgcatcaggaaacgttacaaaccagtcccgatgccattcttaactgcatgaccactatcatcatcaacccggaactcttcggcgcgccggattgtaacgcgcagaccgaagcctttgccgagtgggtgaaagccagcccgcatgatgatgataagccgattttgctaccgggcgagtgggaagtgaacacgcgtcgcgaacggcagaagcaggggattccactggatgcgggaagctggcaggccatttgtgatgcagcgcggcagattggtatgccggaagagacgttgcaggctttctgtcagcagttagccagctaaaaaaaagcccgtccagtggcggacgggcaaacaagggtaacataggatcaatgagggttagagcatatgcgtctgtcggcaaacagacagggaaatacttgtgctggacgtagcgtaaacgcctgatccgtccaacggttcggattttgtaggcctgataagacgcggtagcgtcgcatcaggcatctgttgccggatgcggcgtaaacgccttatccgtcctacgaattacttataaattaccgcagtaccgcttaatttattgttgttggtggcggaagtgatgctgtatccactggcaccggctgccgcggctttctcagccagtttcgcttccagggcatcgagggtggatgcgccatcggcagaaaccacgccgattttattcatgttctgtgcctgggatgccgttaccggttccgccgcgaacacgccaaaactcagagtactaagagccatagcagcaacaacagtattgatagttttcataattaatctctcgcaggtgatttttgtataagtgacgttgtttcgtcgatgtgatgagtatcacgtttttttacgagagataaaatcgaagagaattgaccgccttgttcaaataaattgattgatatctaacctactgataaaccatttatttgttgtacttatgaacttgttttataccgcgtggcagtcacagcagcgttaaaggcacggaatgacacgcaaaatacaaattatactcgctatgcatctcgccagttgtagttaacgtaactggctgtctttgctacctctgcgattatatcctgtataagctggtttttgtaaatctttctcctgctgacaatgaatacataagcgcacgccaggaatggcttcccgacgggcctgcgggatgggggcaccgcactcttcacattcatccaggctttcgccgcgcggaatttcaccccgagcgcgggcaatcgcatcttcaattgtactgttgatctgttcgttgacggcgtcatcgttagcccaaccggatgccatatcgacctccccatatcaatacttgtacagttaagtgtagctaatccagggacgaactcgggcagttcaagcatcagatctcgctccattcccgcagcagattatgataaagattaagcaggctcaggatctcttcactttcgccgtagcggcttttcaggctctgaatattgttgtccagttcaaacagcatggcgcgctttttatcatcgcggatcatgctctggatccacataaaacttgccactcgtacgccgcgggttacgggtgtcacgcaatgcaggctgctggagggatacaacacgagatcgcctgccgggagttttacccgatgttgtccgaaggtgtcattaacgaccagttcgccgccgtcgtagctttgtggatcgcttaaaaacagcgtggcagaaaggtcagtacgcatccagccgttttgtggatggctgcgtactgcgccatccacatggaaaccataggtttcattgttctgatagcgattaaacagcggcgtggaaagggtacgcggcaaggccgcggcaaagaataaagcatgttggttaaccgcgttcagcacctcattttgcagggcggcgtataacgtgctgcgggtgtcgacctgttgattgttcttaacttgcgcaccttgtgcgccggtggtgacgcgtccatccacccattcggcttgttccagttgttcgcgaaaacgagcgacgtcctgtgggcttaacacgccgggaatgtggtacatcatacaatttctccaaaaagtggggcctgcgccccacatctgaatcagaaatgcatattggctgtgagcaagaaggttcttggctcgcccgggtgataacggtagccgctcttgttgatactggcgacgtaatcggtatcaaacaggttgtaaacgtttagctggaagtcgagattgcgattaactcgataccccagtttggcatcggcgacccagtaaccttcggtaaacgctggcgttcccaccgcgccgtcactacctttatgcatactgccgatatagcgtgcgcccgcgccaacagagatatcgtcggttgcctgatattggctccataaggtgaaggcgtgctccggggtatacggcaggctactggaaccatcctgggcaacatctttgccgtttttgatggttgctttttgctgggtatagccgccaatcacctgccacgcgggagtgatattcccggccacggatatctcatagccttcgacgcgtttcttaccgtattggctgtaagttccgtcatcattttgctcaacttcattttcgatatcagtgcggaacagcgcggcggtgagcaacagacgtttatccagaacctgccatttggtgccaatctcgctggtgttggctttttgcggtttaaaatcggtgcggttggcactgttaccgctgccagactgcgcaagggcgaagttgttgccgcccggaggctgctgggaaacggcatagttaatatagacattgccgttttccgtcaggtgatacagcgccccggctttccagttcatcagattgccgctcttggcggtgtcgacggtggtgaccggagaaccttttgccacaccagttgggcaggtgatggcaccgcgtccgctgccgccgcaggcggtggcactgtcatattcagtatgataattatccagacggatcccgccgttcagctcaaaatcacgggtgatttgcagcgtatcaaaggcgtaaattgcgaaggtatccgtctgaccattggcgtttgcgccgttgcgcgtcaggccgccgggatgaatgctgctgtcaggatgataaatatttaccgcgggtaacgtcaccggattaacgccgtagttagtctgcgtttcacgggtaaattccacgccggtactgacatcatgaccgatagaaccggtatagaacgtgctggtcaggttggtctggttggtgagaattttattactcacatctttggtattcgccgtgcgactccaggtccagctattcacatcgctggtgggctgagtaatattgctcgccccgcccataatcgccgtcatcaggtaatcctgctttacgcggctccaacgggtagtattgcgaatggtggtgttatcgttgatgtcgtgctcaaaacgcatggtggcggtgtcggtggtgctatcgtcgtaatcggaatccgtgccgtaaaagttatgagtatcaacttttccggaatgattcagggccgccgttcccgcagatggggcagaatagcccggcaaaccgatggtcggaatgccgccgtctggcgtgttgtgctgggtgacatgcagataattaagatacaaacgattcgctgtaccaaggccaaaagcgacagaaggggcgacgccgtaacgctcatttttgactttgtcgcgtccggcatcgtgcgttttttcgcccattacattcaggcgcaccgcggtggtatcaccaatgacctgattgacgtccagcgtgccgcggcggaaccaggcgctgccaatactggcggaggcgtcaatgccggaatcattgcgcggctgcttgctgatcatattgatgctgcctgtcggtgcgctgcgcccgtagtcggtgccggacggccctttaatcacttcgacctgctcggtattgaaggtgtcgcggctgacgctgccgatatcgcgaatgccatcaatataaatactgttagaggtatcggcaccacgcatataaatggcgtcgccagtggtggagttaccgttctcacccgcaaaaaacgcacccacgccggggacgtttttgagcgcgtcggtaaggttggttgcgccctgatctttaatcacttgttcagaaattaccgtcatcgtgcgggtagtatccgctaccggacggctgaatttcggatcggcagattgttgtggcgcataaaggctaggcgtacttgcttcgacaaccagcgtgtcatccgcgttagtttgcccttcggcggcgagtgcctgagccacaggcgtgatgccaatacaaagaccggcaaagaacgtgaggctatgaaattgtctggcagggaaattgcgattgttttccattttgcaggtgactttttcttatatgttgaaattttcactgccacgagaaagcctctctgcggatgcgatgccactgttaatcccgtgatagtgctcgtgaaagtgataataattttgataagcattatcacttggagcgattttctatcacccattgcgcgaaaaagaaatacatttatttacattgagttcatatttgatgttttttgattacaaaacagacgaaaactgcatccagaggcgaatgcagttacgttggtggggttatttgtagatggttgcagtaccgaacatctggtcatttccgcctgcggaattaatgacataacctttcgcgccttgttcgcgcgctttttctgccagtttatcctccagatcgcttaggttacttgcgccagttgcgctaacggtaccggcgggccgtagctgaccgctgtccaggttactcatcggttgcgcggcataagccgtgagagagattccgctcaggacggtggcaatcagtagtgtgaggcactttttcataatgacatcctcataaatacaacgggtagtgcctgataagtgtaggtcgcctgcgcgatgcaaatgacgcaaaaaattgacagagatgtgcttattttttgaacgatatatttttacaaaataagacaaatcaatgacatgcataatgctgatttttatgatgaattgccataaaccatagccatgttaaggttttggggaatgataaacgcagccagatatttaccctgtcgcgttatgcgggtatcttacgccgctgcttaaaggagaatgctatgtccgcccagaaaccggggttgcatccgcgcaaccgtcatcacagccgctacgatctcgccacgctttgtcaggtcaatcctgaactcaggcaattcctcacgcttacacccgccggggagcaaagcgtagactttgccaatccgctggcggtgaaggcgctcaataaggcgttgctggcccatttttacgccgtagcgaactgggatatccccgacggttttctctgcccaccagtaccgggccgggcggattatattcatcaccttgccgatttactggcagaagcaagcggaacaattccagcgaatgccagcattctggatatcggcgttggtgcgaactgtatttatccgctgattggcgtacatgaatatggctggcgttttaccggtagtgaaaccagcagccaggcgttaagcagtgcgcaggcgattatcagttctaatccggggcttaaccgcgccattcgtctgcgtcggcaaaaagagagtggggcgatttttaacggcatcatccataaaaacgagcaatacgacgcgaccttgtgtaacccgccattccacgattccgccgctgcggcacgggcaggtagtgagcgtaaacgccgtaacctggggctgaacaaagacgatgcactgaactttggcggccagcaacaggagttgtggtgtgaaggcggtgaagtcacctttatcaaaaagatgattgaagagagcaaaggcttcgcgaagcaggtgatgtggtttacaagtctggtatctcgtggtgaaaacttaccgccgttgtatcgtgccctgacggacgtgggcgcggtgaaggtggttaaaaaagagatggcccaggggcaaaagcagagtcgctttattgcctggacctttatgaacgacgagcagcgccgccgttttgtcaatcgccagcgttaaagcgttggttcccccggcggtaacggttcagccggggtcgcgcccggagcaggcagcacctgataagtctgcactggcgcgcgaacgcccgccaggtcgaaatgttttttcacctggctgtcgagggcaaagcgtaccgtccactgtttgagtggcagcgtggtgaagctaacacgcagtgtaaacgcggtattgcttaagccgacaatcccggcaaaattcggttcaccaataatcagcccgcgaatttcttcgttttccattaattccgctaccgcatctttcagtgcctgattggctttatcagcatcttcatggcgatcaacatcataatttgccaccacgctaccaatgccgcggacaaagttagcaaaggtggttatgctagaccacggaatgatgtgatacgccccggtatcctgtcgtacgcccacggagcgaatgctcatccgttccactgtgccggtcaacggcccgatagtcaccaaatctccagtgttcatgccgttttcaaactgaataaataccccggtgataatatctttcaccagcgtttggctaccaaagctgatagccagacctaatgccccggcacctgccagcaatggcgcgatattgacgccgatttcgctcaacacaatcatgatggtgatggtactgataatcaccgccagcgcgttacgaaacagcgtaagcagggtacgcgtgcgggcgctgggtagcgggcggccatgaatatcgctagccagccggttttcgatcaaactggcgagcaccgtccagccaaccgcgctgaagaaaagaatgagtgcgatacggatcaggatatctacggttttctgccccgcgccgttttgcagccagttccagaaatcgaacaatccccatgcgctcaacagcaacattaccgccacgcagactgtcagaatacgcgccgttttcagcgccgcgctcagccagccattcaaccgtttttgcagctccggatagttacgctgagtatgtgggctgagagtgatggttttcgccagccagcgggaaaacataccggaaacaaacgctgcgataccaataatcgccaggctgcgcaccgttgcacccatcataaatttcaggctgttgcccggatcgaacaagctaaagaaaaacagcacgataaaataggcgcttgccagccagtgccacaccagcgcaaaggcgcggataaacaggctgaaaaaggccaggctatgctccgcgaagttgagcaaatgctgggtaatctcttttttattacgaaagatcaggtacaacgcccagacggtcatgcacagcataatgatgacgttcgccagcgcacctatctgtacattcacctgattagagataatcggcacggccacaatcaggccataacctatcaaactgcttaaccagctcaggcgacgactccagtaacgggcgctctcgtcctgaatcgtgaacgggcgcagctccgccacgtttgggcaaaaaatcaggcgtagtacggctttgaaaaattcaatgagggcaaaggcgttgagaaacaaactttgttggaaagcgatggtgcgactgcctgcattcaggttgtcgcttaatacctggccgacaaataatgtcagggccagtaacagcaggtcgataataaacgccccgataatcatcgccggaagctgcaaccagttactgcgctcacgatttttttgccgcgcccactgacccattttgcgatacagcggcagtgcgcacaggcgaatcagccagtaaaaaccaaacactaataccgctaacatactaaaatgggtcagcgcattgctgaaggtttgtggattaaacggcttatgcggggagccggtgatattgcgataaagttgcccgaagcgggcggaaagggcttcaccataatggcggctgacttcggtgaccttttgcagcacggtttgctcttcgaccagcgtcggcggcactatttttggtaccggttcagcagggggcgtagcggcaacggtgcgcaactggtcgatcaactctttacggctggtgtcattatccagcacatccgccagtgcgccataggccgcttttttttgttcgatatccggttccggggccggttcagtcgtactgtccgttgtcgttgtggttgtaacgccgggtatggataccgcgtgggcaggtgcgcccagcaggcagaagaggatgaacaggatccaccgcatgactcctccagtgagaaaatagagcaaaaagataagtatagatgctggaggaggggcgattttaaatgagaggaatctggtgtgcctccctttcgggtgaaagggaggaagggatattaagcaggttgctgacaacgtgcgggcttttttgccggatgcggcgtgaacgccttatccgtcctacaagttcatgcaattttaataagttgccagatatcctgtaggcctgataagcgtagcgcatcaggcaatgtgtcttattaagagacgtgctgcaaaaattcctgcaagcgctggctcggcgggttcttgatcaacacctgcggattgccatcttccgcaatccggcctttgtcgataaagatcagccggctagctactttctcggcaaaaccgatttcgtgggtcacgatcaccatcgtcatcccttcttcagccagatcctgcataaccttcagcacttcatggcgcagttccgggtcaagagcggaagtcggttcatcaaacagcatcattttcggcttcaccgccagcgcgcgggcaatcgccacacgctgctgttgaccaccagaaagttcggaagggtagtgatgtgcacgttctgccagaccgactttcgccagcagctcacgtgccagtttttccgcctcttctttgttcgcgccacgcacgcgtagcgggccaaacatgacgttttccagcgctgtcagatgcgggaagaggtaaaactgctggaacaccatacctgcttcctggcgaatcaggcgctcgtcaactttcggatcgttaaccttcaggccatcgacaatcagatcgccggaggtgatttcttccagtttgttgatgcagcgcagcagggtgcttttaccggaaccggacggcccgataatcaccacgacttcgccctgggcaatgttcaaatcgatattgtgcagcacctgggttgggccaaagtgcttggagacgtttttaaattcaatcacaggattttcatccttctttccagacgacgcagaataaagctcagcaccagggtaataatcagatagaacaccgccacggcgctccagatctcaagggcgcggaagttaccggcaataatttcttgcccctgacgggtcagttccgccacgccgatcacaataaacaggctggtgtctttaatgctgatgatccactggttacccagcggcggcagcatacgacgcagtgccagcggtaaaatgacgtagcgaatggtttcccaacgactaagaccgagcgccagtcctgcttcacgaaaacctttgtggatagacagcaccgcaccacgcgtgatttccgcaatatacgcgccggagttgatcatgatggtgaccaccgccgcagtaaatgggtcgatgcgtaagtcgttaaacgccatcggcagggcgaaataaataaacatcacctggacgacgataggtgtgccgcggatcacttcaataaagaccagcgcgacgtggttggctatccaacctccgaaggtgcgtgcaaaacctgccagcaatccgattaccagaccgcctgccagaccgaggacgctaatccacagggtcattttggcaccttcaatcagaagcggaatggcaggccagatggcactccagtcaaactgcatatgttgttcctgttaccgtggtgtaaataatcaaattcagggtaattaatggccccggagcgggtttgcgcccctcaccctaatcctctccccataggggagagggaactgccagtgcgttttacaggtgtagcgttattatttcggttcagtaccgaaccattttttgtagatttcgttgtaagttccgttctcgcgcagggttttcaacgcgccgttgactttgtcacgcagctcgtcgctacctttcgggaacgcaataccgtattgctgcgcttccagagagtcacctaccgctttgaactgaccgttaccggcggttttgatgaagtacagaatgtttggcgtatcgtgcagaacggcgtctgcgcggttggtgcccagttccatataggcgttatcgatgttcgggaactgacgcagatctttagttttgatgtttgctttcgcgtaatcaacggagccagtaccgctcttcacagcaaccactttcccgtcgagatctttcacgcttttcacatcgttattgttagctttcaccatcactaacaggccgcttttgtagtagccgtcagagaaatcgatcgcttttttacgctcgtcggtgatggtaatgcccgccagcgccagatcgacgtttttggtttgcagtgccggaatgatcccactgaaatccatcggcttcagttcgtaatccagcttcagctctttagcgatggcagcccacagatcaacgtcaaagcccacatatttatcgccctgtttaaattcaaacggaacgaaggcggtatccgtcgcgacaactaattttttatccgcggcatgagaagaaaccgcaaaagccagggtcagtgcagccagactaacttttaatacagacttcatagcatttccttttttctatccacgggacgatcccctgcgtgacattcacatatatgaaaaaatcgtgccagttttgcaactccttgatttttcgagatgcggcaaaaacgtgatgcacgatttatagggcaataccctgaagatgcaccattctggggcaccaatctggtgcgctaaaattgtgcactcaacacagtgattatttagcgtaaaacctgatgaaaaaacaatctttatgtaacgattgtgtgatgatgtggatacaaaaaatttacttaatcagctggagatagcagatggatgcactaaataagtgcgttgaggtgggctgcaaaacaaaacggcctcctgtcaggaagccgcttttatcgggtactaaagttctgcaccatcagcgatggatttattcgatgttagactcgataaaccacaggaatttatccaggtcgcgagacgcggcggtcaggatatctgcggtgtcgtcatctttcgcttcgccaatcgctttgcgtacgtcattagcgacgattgcgtaacggtcagccagttctttcaggtgatcctgaacgttgtggatgtccagcgggtaacttttcagcggggttttgctgttgataacttgagtggtccccagagctacaccgcccagctgcactgcacgttctgccatggtatccagatgatcgatcagtgcggtgcggaagccatccagcatttcatgtacggcaatgaagttagcgccgcgcatgttccagtgcgcttgtttggtaatcaaagaaagatcaataaactggataacctggcgattcagcaactctactgttgcttttttctcgctgtcggagacatcgttgcgggtataaagcagattggtcgctttacttttaactaatttagcggtactcataatttcatatcctcttgatgttatgtcccagtaattaacgagattaagtatagcaccggctatgtgttccgctattctggctgttcctatcacactaatagtggtaacaagcgtgaaaaacaaaactaataaagattcaatgagttagatatattgataagaacaattcttatttatctgctcgccaggaattttcggaataaatatgcttttgcataattcgatatataaagacggtgtagaggaaaagtagcgagaaattctgcatggttatgcataaccatgcagaaatgtaaatttaattaatgtctaattcttttattttgctctctttgcgtactgtcagcgtagaccccatactagcggcgatgatagcgccgagcgccagtagctgtatgggtgtcagtgtttctccgaggaaaatcatcccggaaacggcagccagcgccggttccatgctcatcagcgtaccaaatgtccgtgttggcaaacgggtgagggcaatcatttccaggctataaggcagagcggtgctgagaatagcgacagccagacccaatggaataacgctccagtgccagagtgcttcaccagcctgaagcgctccaattggcacgaaaattaacgctgcaatcaagctaccaattgccaccgtcgcagggccatgttccgctcctgcgcgttgcccacttaaaatgtaaatagcccaacaagccccggcccccagtgccagcgcacagccggttaaatcgacatgggaaacgtcttgccccagcggtagcaggaaccacagaccaagaaccgccagcacaacccagacgaaatctaccgggcgacgagaagagaacagcgccaccgccagtggtccggtgaactccagcgccaccgcaatacccagcggtactgtctgaatagaaagataaaaaagataattcatcccacccaggctaacgccgtaaaacaacagcggtaaccgttgctctttggcaaagcgcagtcgccatggcttaaagaacgcgatgaggatcagcgttcctaatgccagacgcagcgcagtgacacccggtgcgcccaccagaggaaaaagactcttagctaagctggctccaccctgaatagacgccatggcaacgagcaatatgactattggtaaccagaccggcattttacgtaaactaccaggcatcctttctcccacaaatatctagacttaagtaaagcgtggagtgtactggatatacccaatgctggttgagcatttgttgaaaaaattttcccccgttttgactaaaatgcgccaggattgatggaatcattagtctggtgattaggaataatctggatgaatgacagggaaaacatgcgtaatacttacgcagttctctgaaaaagtgatttaaatttagatggatagcggtgtatggaaacgttctgttacatgaaatggcccgttagacatcacaaatcgcgaagagtttcccattaatttttgatatatttaaaacttaggacttatttgaatcacatttgaggtggttatgaaaaaaattgcatgtcttagtgcactggccgcagttctggctttcaccgcaggtacttccgtagctgcgacttctactgtaactggcggttacgcacagagcgacgctcagggccaaatgaacaaaatgggcggtttcaacctgaaataccgctatgaagaagacaacagcccgctgggtgtgatcggttctttcacttacaccgagaaaagccgtactgcaagctctggtgactacaacaaaaaccagtactacggcatcactgctggtccggcttaccgcattaacgactgggcaagcatctacggtgtagtgggtgtgggttatggtaaattccagaccactgaatacccgacctacaaacacgacaccagcgactacggtttctcctacggtgcgggtctgcagttcaacccgatggaaaacgttgctctggacttctcttacgagcagagccgtattcgtagcgttgacgtaggcacctggattgccggtgttggttaccgcttctaatcactttggtgatataaaaaatccgcctctcggggcggatttttgtttttaaggtttcgggtcgaaaatatcggttccgagatggttgtaatccaccttctgtaactggaagttggtgatgtatatcggcccggctttcttctcagatataaacgggtatttgatgttaatttccttcgctttaatccccgtccactgggagaaaaagcctaagaagtcattggcactgcggcgggctttaatcacacgatgcgctttatcgtcgctggaaatgaccataaaaggcacctggaaattttgctgatatttatcatcatgggcaaggtattgcacgtctttaccgcgctctttaaaggccagaccgtggtcagaaaagtaaaccaggctgaagctgctgccgctgttgcgtaactgatcgtacagcttgcgcagtaaatcgtccgtttgcgtcatggtatagagatagcagctcgtttctttgctttgcacaaaggtttcgtattttccttgtgtcctgtcgcaggcctgcggatgactgcccatcagatgtagaacaatcagctgcggttggctgtgctcttgcgccagcacttgagcggtcatatccagtaacgcttcgtctttggtgtttttatctgcttcaaaattaccttctttcaggaagtacacttcatctgctcgtttggcgatgctggcgatagcggtatcgtattcgccgatttgaccctggttggaaaaccaccaggtctggaagcccgcgcgatttgccagggtgacaaagttatcctgaaactgtggtttgccatcgacaacgcgattgagcgttaagccaaggcttttctgcgtggagccactggcggcaatgtagtcagcaaatatcaaaccgttaacgctgctggcaaacggggtattgtcccagtgaccgccaaaggcaccgagggcatcgcgacgcgcgctttcaccgatcaccaccacataggtctgatacttcggcttaacggcagtgaccgtccaggtatctttcattccggaaagttttgccatccgttcttgctcttcaatcacctcgttattattgacgatgacatccttagcaaaacgaaataccggatagccagtatctttcagtttaaatacgccaccccaggccaggttttgcacgggagcaacaaaaaatgtcgccacactgaataccagacacaggctgtcgaaggtattccagcgcgctttttcattctctttttttcgcctgattgctattacgccgagcgcaaaaataaataagccgaccaggtagctgtaccacggaaaaatcgtcaggatttcggtgctctcttccatattggtggagtgcaatgccagcaatgtattgaaattaggcgcgccgtaggcctgagcaaaagggaaataacaagccgccaccaggctactgacaccgaccagaactttttgtacgcgaggcaatgttcgccatagcaaaagcaaaatagccgtaaacgcagcggtgtagagcaaactgaaggggtaacctaagccgaggttaattaataggctctgtaaaaagtagaacgcagtccacgggctaaatacccggctacgggtaacaaggctttctttgagggttaaattcatatgccactatcgtaacaaacgccatgtgcttaccctggcgtcaagggtcaatacctgcaagagtgcgtgaagagtggaaaggggtccgcatccgcgagccgcaatatacgcagggctgcaagaagatagagcgagccgccgtagtggtcaactactgacgaacaaatcttttgcgaaggggattgcaaatccgacaaaaagtggggtttttcagaccaaaacgcgttatgcctgcatgaaagcaggagtgaagcggcgtaccgcgacgccgctatttatcggaaggtttatcttgctgcggtttgttgttgaccatatcgcacaacatagagagcagcattaaccgtactttaaagggagaatgactaaacacgcgcatacacctcttgaactcattcataagacctcctgacttgctaatcccgtcgatccttgaggggtgattgcattacatacagatatagcacaggctatattatatagctattgctaaaacgttaattttttgtaccttcgcaactctggtttacaatgtgcgcacgaaatgagaacgctatgtatgcgtcaccataatgaggaagcacaatgagtcgtcgcgcaggtacgccaacagcaaaaaaagtgacgcagttagtgaacgtggaagagcacgttgaagggttccgccaggtcagagaggcgcatcggcgcgagcttattgatgattacgttgagctgatttctgacttgatcagggaagtgggggaagctcgtcaggtggacatggctgctcgtctgggagttagccaaccgacggtggctaaaatgcttaagcggctggcaaccatggggctgattgaaatgatcccctggcgtggcgtgtttttaacggcagaaggagagaagctggcgcaggaaagccgcgagcgacatcagatagtcgaaaatttcttgttggtgttgggcgtcagtccggaaatcgcccgtcgcgacgcggaaggcatggagcaccatgttagtgaagagacgctcgacgcttttcgtttgtttacccagaaacacggtgccaaatgagcctgccttttttacgcacgctgcaaggcgatcgtttttttcagttattaattcttgttggtatcggattaagctttttcgtgccctttgcaccgaaatcctggcctgctgctatcgactggcacaccatcatcaccttaagcggcctgatgctgctgaccaaaggtgtggagttaagcggttattttgatgtgctggggcgcaaaatggtgcgccgctttgctacggagcgtcggctggcgatgtttatggtgctggcggcggcgctgctttctacctttctgaccaacgatgtcgcgctgtttattgttgttccgctgactatcacgctaaaaagactgtgtgagatcccggttaatcggctgattatttttgaggcgctggcagtcaacgctggtagcctactgacgccaattggcaacccgcaaaatattcttatctggggacgttctggtcttagctttgccggatttattgcccaaatggcaccgctggctggcgcaatgatgctgacgctcctgctcctgtgctggtgttgtttccctggaaaggcgatgcaataccatacgggggtgcaaacaccggagtggaaaccgcggctggtgtggagttgtctggggctgtatatcgtctttctgacggcgctggagttcaaacaagagctgtggggactggtgattgtggcggcaggctttgcgctgctggcacgtcgcgtggtgctcagtgtggactggacgctgctgctggtgtttatggcgatgtttatcgacgtccatttactgacccagcttccagcgttgcaaggcgtgttgggtaacgtgagtcatctatctgaacccgggttatggttaacggcaatcggtttaagccaggtgatcagtaacgtgccgagtaccatattgttgctgaactatgtgccgccgtctttattactggtatgggcggtaaacgtaggtggctttgggttattacccggaagcctggcaaatttgattgcgctacgtatggcgaacgatcgccgcatctggtggcgtttccatctctatagtataccgatgctgttgtgggcggcgttggtgggatatgttttgttagttatactcccggccaactaaggtctggcaaataaaaaaggcggattatgagtccgccttttgctttaagttttgaagattaattcagacgaaccggcatcccggagcggtttttaatcgcttcatcaagaacaacctggtcaacatctggctgaccggtcactgtctgcacgctcttcgtcagggtaattggcacaatttcctgaccttcaaactgggcttcggtggtagacagcgggttatggacttcaatataacggctgccgtctggctcggtggtcgcttttaccggctcatcaataaactgtacgcgggtaccgaccggtactttctcgaacaggaatttgatgtcttcgttacgcagacgcacacaaccatgacttacacgcaggccgataccgaagttggcgttggtgccatggatagcatacaggcgaccgatatagagtgcatacagccccatcgggttatccggacctgccggaacgacagccggaagcggttcgcccgcagcgcggtactctgcgtgcattttggcggtcggcgtccaggtcgggcctgcttttttacgctcaactttggtggtccagttgataggcgtatctttgcctaactgaccaatgccgatcggcagcacgataacggtgttggtccctttcggatagtaataaagacgcatctcagcactgttaatgacgatgccttcatgaacggtatccggcaggatcagctgctgcggaatgttcagtacagtaccgcctttcggcaggaaggtatccacacccgggttcgcttccatcatattggaaagccccatctggtactcggcggcaaaatactccagcggctgagtgttaccttcaggaatggtgatcacctgattctgaccaaccaggcgactcccgtcggttggcagaggataagttaccgcagaggcggtactgcaaaagccgacaacagcgaaggccgctgcgaataatgttttcaatttcatattcatgttaagcgagattttgtgcctggcaggccattgggttgagaatattagagtattggaagcgcattataagttcattccagctcacagtgaaatcagatgtgtacgaaatcacattttttgcctttggcttgagtgtagaccttaagcgaggagcaggatcttctttcagacttatggcataatgcgcggtttgtcatatctcttttcaggatacgcctgtgttagtttccagtaacgtcaccatgcagttcggcagtaagccgttgtttgaaaacatttccgtcaaatttggcggcggcaaccgttacggcctgattggcgcgaacggtagtggtaaatccacctttatgaagatcctcggcggcgaccttgagccgacgctgggtaacgtttccctcgatcccaacgagcgcattggtaaactgcgtcaggatcagtttgcctttgaagagttcactgtgctggatacggtgatcatggggcataaagagttgtgggaagtgaagcaggagcgcgaccgcatctatgctttgccggaaatgagtgaagaagacggctataaagtggccgatctggaagttaaatacggcgaaatggacggttactctgcggaagctcgcgccggtgaactgttgcttggcgtgggaattccagtggaacagcactacggcccgatgagtgaagttgctcctggctggaagctgcgtgtgcttctggcgcaggcgctgtttgctgatccggatattctcctgctcgacgaaccgaccaacaacctcgacatcgacaccattcgctggctggaacaggtgctgaacgagcgtgacagcaccatgatcatcatcagccacgaccgtcacttccttaacatggtctgtacccacatggcggatctggattacggcgagctgcgcgtttatccgggtaactacgatgagtacatgacggcggcgacccaggcgcgtgaacgtctgctggccgataacgccaagaagaaagcgcagattgctgagttgcaatctttcgttagccgctttagcgccaacgccagcaaatctcgccaggcaactagccgcgcgcgccagattgataaaatcaaactggaagaggtgaaagcctccagccgtcagaacccgttcatccgttttgaacaggataagaaactgttccgtaacgcgctggaagtggaaggtctgaccaaagggtttgataacggtccgctgtttaaaaatctcaacctgctgctggaagtgggtgaaaaactggcggtactgggtaccaacggcgtcggtaaaagtacgctgctgaaaacgctggtgggcgatctgcaaccggacagcggcaccgtaaaatggtctgagaacgcgcgcattggttactatgctcaggaccacgaatatgagtttgaaaatgatctgaccgtgttcgaatggatgagccagtggaagcaggaaggcgatgacgagcaggcggtacgcagtattctcggtcgtttgctgttcagccaggacgacatcaaaaagccagctaaagtgctttccggtggggaaaaagggcggatgctgtttggtaagttaatgatgcagaagccgaacattctgatcatggacgaaccgaccaaccacctggatatggaatccattgagagcctgaacatggcactggaactgtatcagggcacgctgatctttgttagtcacgaccgtgagttcgtaagctccctggcgacccgcattctggaaatcaccccggaacgcgtgatcgactttagcggtaattacgaagattacctgcgtagtaaagggatcgagtaagtgattatccgtcaccccgatactgtcggggtgacggcggctgatgacaaatgcaaaatagcctgatgcgctacgcttatcaggcctacgcagtacctgcaatatattgaatctgcaggactttgtaggccggataaggcgttaacgccgcatcaggcattaacaaagcgcatttgtcagcaatctgagtaacgtcgaatcgattttcttaatcccacatcaattcacttccattaattctcaaacatccatgcccaacgctcgcttaccgtgaatgttgaggtcggcaagcgtaaagcgtccttcccagtttgtttcatagtcctcgcgcgggaagtcgcccgggcttgcgcctttttccagtgcggccttcaccttgtgcgcgtaggcaagatttttctcgcacatcggtgccgcaggaatgtacatcacgttgccccaaccttgttgattttcaacgggggcaacggaatggatgacgtcgcagtgccaccagacggagtctccggcttcgagttttggaatgctggttaacgcctcaatcaacagtggatgccattgctcacttaccggcaatactcttccgggcgctacgccgcacagttcatcctccggcacatcatcaagcagcggacgtaacagtacgtacgccatagcttcaggaatgggcacgacgtgcagcagcccctgaccaggcagcatatcagagagcgctgtccagccctggaatgtccgaaacacggaacatttggtggtgttgtccaccgtgtactcttcaacttccgtacgatgtgccgcatgccagggatcatattgcgccagattgccattaaagacgttggcgaaaacgcgctgatacgctggaagcagccagcgttccagtgccccggagtcggtatgcgctccaagacctttggaggtcgttccgggcggacggcggcggatacggtcagggtagatgacgctcacatccgggttaaaccattgctttccatcactttcaaatgtccacagacgattgagaaagctctgcgcattcgccatttcttcactctggcgggcctgcatttgcgcctggctccagtagatggggtaaatctcgggacgactagcgctgagcgtcccgaagaaattatcgccggggcctttgtagacctcgtcaaagcggttgcggtccagatagtccagcatgctctgatcccagcctagcgcttgttcgcgggggaaatggccttttatcaccgcacaaccgcgacgtttaatctgttcgcgctgctctgcagtaacatgacctgctttgatatcggcataagacagcaccggccagacggcatcgccctgtgctttgagtgcgttgatttcagccactcgcgtggcaatgtcatcgcttagctgattaaagatctgctggacgtcgccaagctgcgcccgcagcgcgtgcttcatctgacggatagctgctttgtgatcggcaggcaatgtgtcgctggtaaaagtagaagccataaccacctctcattaactttcattcgaaaccattctgatttgcatgtgacaatataagttataaataagttaatgcaagtttaatgatttgatgtgatgtacaggatgtaaaaagaagggaaaaccggagcgcacggctccggtagagaggtcagctgttaaaaggggatgtgttatccagcaccgcctgaatcacattcagcgcgccttcatgattattatcatcggtagcgtaacgggcgatttgtttaatgttttccgcagcattgcccatcgcaaaggaataacgcgccattttcagcatctccgcatcgttaccgctgtcgccaatcgctaccacattttgcggactcagatcccagcgtttcagtaaccggctaataccgtttgctttatgtagaccgggaataatcaggtcgataaagccaaaaccactggtaacgggtttcataatgccatcgagcgctacgtgcagtttgtcgatcactaacgggatttgttcatccggcaggttgaggctaaacttgaacagtacgtcgtcaatctcctgataatcttttacaggtttcaggcgatggtagtgttttgccatcagtgcgacaaatgcttcgggggcattttcgctgacatatgcactttgcagaccgcaggcgacaaaattgagttgcttatcttttagcaactcgccaataacaatccggctttcatgtcgggtcagttcgccgtggaacaactgcttgccatgttcgtaaaccagtgcgccgttttccgcgacaaaagagatctcatcctttagctcaggaaagaaactaataagctggtaatactgattaccgctggcaacaacgaacttaatgccgcgctttttcagttcctgatattgcgccataaaacgtggttggttgtacgttttggcgtcgttaagaaaagtaccgtccatgtctgtgacgataacttttacgctcataggtgtgctcctggctcgaaaatgaaaccgtaacagtgtaataacaatgtgacgcagagcacaaattatatttcgaatgaaagtaaggatgaaattgatgatgtgaatgatttagcccggcgacgacgccgccgggccgaggagattacagcatatgttcagtacgggcgatgatatcgtcctgagcgtctggagagagcgcggtgaagaacgcggaatagcccgcgacacgcactaccagatcgcgatactgatcgggatgttttttcgcatccagcagcgtttcgcgggaaacgatgttgtactgaatatgccagcctttatgcacttcaaagaaggtacgcagcaggatcatcagtttctgcttgtcagattcgttctccagcgttgccggattcagtttctggttgagcaacacgccgccgagaatcgctgccgtaggcagtttacccacactgccaatgaccgcagtagggccaagatggtcagtaccggaggccgggcttgcgccttctgccagcggggtgtgggctttacgcccgtccggtgttgccatagtctgcgcgccaaacggtacgttagcggagatactactcgtacccgcgtaatagttgccgccaaccggaccacgaccgtagcgcggattatggtactgtttcagttcgtcgatataggtctgataagcgcgagccagcagcgtatcgacagtatcatcgtcgttgccgtacttcggcgcaccgttaatcagccgctgacgcagctgctcgtgagtcaggccgtcgaagtcatctgccagtgcggcagcaagctgttgctgaccaatcgcaccttgttcaaacaccagtttcttcactgccgccaggctgttgccgaggttggcaatgccgacctgcaggccagaaacccagtcatatttcgcgccgccttgcttgatacttttcgctcgctcaatacagtcatccaccagcgcgctgcagagaatatcgtgcacgttctcttccagcatggtgtcgacgacatattcgatttcgatacttttgcgggtgtagtaacggatttgcgtatcccacgcgtccatcacttcatcgaagttgttgaagttacctgcgctcaacgctttttcttgtggcaggaacactttgccgctggtggcatcatgcccgccttccagcgccgccagcatcacgcgggcgaagttgataaagctcatgccggtacagcgatagccccatttgccaccgacggcggtttctatacaaccaatcgctgcgtagtcataagcgtcctgcggttcaataccgagtttaataaattccgggatcacgatttcgtcgttgttgaacgccggcatcccgaagccgcaacggatcacctgtacgcaggcgtcgaggaaatcgttgctcattcctgcatggtaacgcacgctgaggttaggctgagtggaacgcaggcgaccgcaggattcgaggatcgcgtaagagagtggattcaccgcgtccattggttgaccatcaaccagattttgcccgccaatagtgacgttctgatacagcggacttcccgcagaggctttactgtgactgccggagcggatcttgttcacttccagcagtttcagccagcagctatgcagcatctcgatggcgtgttcgcgatccagcgtctggttgagttcaacgtcgcggcgatagtacgggtagagatactggtccatacgaccaaagcttacactgtgaccgttagattcgatctgcaaaatcaactggatgaagtaacacagttgcagcgcctgccagaaagtctgcggcggctggtgggcgataagatcgcagttttctgccatcgccagcagttcatcgcgacggctttcgcgggtttcggtcgcggccatttcacgcgccagggcagcgaaacgttcaatgtgttcactgactgccaccagcacgatatcaatcgctttcaggaattgctcaccgtgtaaatcttccagcaccgtcaggttgatgcggctgcgacgttccgctacttcctcgcgcagaccatcaagccctttttccagcagcagcgggaaattcaccgccaggtgcgcatcgccggaggtcatattgccttccgctttaatgattccggtcgccagcagacctttttgctcatcggtaaacatgccgtagcagcgatcctgtacggtctgaccgcgccaccacgggcacacttcatgcagaacgcgtttgttctcttcgctcaccgcaaagccagcaccgggacgatctgccagatcatcaatctctttttcgatccagctgacagtatattccgggaagatcggcgcggcgcgaacttcgcttgcctggttgccaatgatcaactcatcgtgtttgatccagatggtgcgattcgccaggtgatgcgccagtgccagcgcgcgacgtaccgggatcggcttatcgagatgttgttgatacatctcggtatagtgctgcgcgcgctcggtacagactggcggtttcacaatatgcaccagcgcatttttgtgcgctttaatgcggtcgctgagcgtgtccagtttcagtgtggtcatggttgttatcctcgtaaggtcgcggttaaccctttctggcaggcatactgctgggcaaagtcgagcagttctggcgcatcaagcggtttttccggggcgtcatagggcagattaagtaagtgatatttgttgatgcccagcgtgtggtagggcagaaaatgaatttcgccaacgtgcagctcgtcggcggcaaaatcggtaatggcttttacagaggtttcgtcggcattaaagccctgaatcagcggcacgcggataatgatttttttgcccgctgcggcgagttttttcaggttatccagcactctggcggcgttaccgtcggtccactgtttaaacggcgcgtcggcaacgtgttttaaatcggcaagaaacagatcgatatagggcagagaaggggcgatatatttccacggcacatgcagacaggtttctaccgcagtatgaatgcctgcctcgtggctggcttgcagtagcgccatcgccatttccggctgcataaagggctcaccaccgctaagcgttaaaccgccgccgctgcgatcgtaaaacggtttatcgcgcagaacggtcgtcatgatctcctcaacgcttttcacttcaccacacacggttaatgcctgtgtcggacagcagtcggttaacgccgtcagatgctccggggttaacttttcccgatgaataagcaaaccattcagcgcgcgctcaatcacttccggcgcggccttagcgcacagctcgcagccttccagacacagtcgtgcgtcatacagcagatcctgcgtgcgggcgcggctttccgggttctgacaccagcggcagcccaggctacagcctttaagaaatacgaccgtgcggataccggggccatcatgggtgctgtagcgctgaatattgaaaatcatagttgcctctctatttcgttcaagcattaaaatactttcgaatgaaagttagattgatgtgcgtcaactgttcagagagttttcccgtgatagtctacattcagacaaaaagtacattttgaggatggttatggaactgtatctggatactagtgacgttgttgcggtgaaggcgctgagtcgtatttttccgctggcgggtgtgaccactaacccaagcattatcgccgcgggtaaaaaaccgctggatgttgtgcttccgcaacttcatgaagcgatgggcggtcaggggcgtctgtttgcccaggtaatggctaccactgccgaagggatggttaatgacgcgcttaagctgcgttctattattgcggatatcgtggtgaaagttccggtgaccgccgaggggctggcagctattaagatgttaaaagcggaagggattccgacgctgggaaccgcggtatatggcgcagcacaagggctgctgagcgcgctggcaggtgcggaatatgttgcgccttacgttaatcgtattgatgctcagggcggtagcggcattcagactgtgaccgacttacaccagttattgaaaatgcatgcgccgcaggcgaaagtgctggcagcgagtttcaaaaccccgcgtcaggcgctggactgcttactggcaggatgtgaaagtattactctgccactggatgtggcacaacagatgattagctatccggcggttgatgccgctgtggcgaagtttgagcaggactggcagggagcgtttggcagaacgagcatttaaccggacgttctgcatcctcataaattgctgatgacgtggcggagtgccgcgtcttatcaggcctggaggtggcaattactgcccacacacctcacaccccggattacgcatcagtttcatttcgcgaaactgacaggtcatcgcatcgtacatgacgattttcccgctggccggtttgccataacctgccagcattttgatcgcttccattgcctgcaagctaccaattacgccgatcaacggtgccattacgcctgcttccacgcaggttaatgcattttcaccaaacaaacggctaaggcagcgatagcacggttcaccgtcctgataagtaaagacggtgatttgaccttccatacgaattgccgcgccggaaaccagcggtaccttcgcggcaaaacagcctgcgttcagttgattacgtaccgcaacgttatccgtacagtcgagcaccagatcgtgttcagcaatcaatgctgcaagttctgcgtcatccagcagtgcattgactggcgtaatcgcgatatgtgggttgatccgcgtcagggcgtcacgggcggattccaccttcggttgcccgaccgtggcatcactgtgcagtgtctggcgttgcagattgctgaggctaaccgtgtcgaagtcgagcagcgtcaggttaccgacaccggcgcttgccagatactggctggctgcacagccgaggccgcccaggcccactatcagcacgcgagaatctttcagcgcctcctggccgtcaaaatcaaagccgcgcagaatgatttgccggttgtagcgcagcatctcctgatcgctgagttccgccattacaggcctccgaacaacgcgttaaacggttctacttccacccattcgcccacttccacattgccgcgatcgcgttccagcacgataaagcagttgccgaggctaaaggagctaaatatatgactaccctgatgtccggtggtcgtcacttccagttcgccatcggcgttgcgttgcagcacgccgcgctggaaatcaagacgtcctggcgtttttttcaggcgggacgctgtgcgtacgcgctggcgcgcgggcaggccgctggcggtgttaccgcttagttttgccagcaaaggctgtaccagttgatagaaggtcagcgtcgcactaaccgggttgcccggcaggccgcagaaccagctattgctgagtttaccgaacgcgaacggtttacctggtttaatcgccagcttccagaaggcgatctcccccagctcttcaagaatcgttttggtgtaatccgcctcacccacactaacaccgccggaactgatcaccacatccgcctggctgtcggcttcaataaatgcggcgcgcagggcatggggatcgtcgcggataatccctaagttaattacctcgcatcccaactgttctaacatcaggtgtacggcgagacggttggtatcgtagatttggccgtcgcccagcggctgaccgggcaactggagttcatcaccggtagaaaaaagcgctacacgcactttacgaatcaccggaacttcggcaatccccagactagcaattactggcagctctgcggtagtcaggcgagttcccgccgggaaaacaaccgcacctgcagagatatcttcaccgcgacggcgaatattttgcccgctacgcacttcagcagtaaaacgcacgccattgtccatttgttcagtctgctcctgcatcaccaccgcttcgcagccttccggcaccggcgcaccggtcataatacgaatgcaggtacccgcaggccattcaccatggtatggctgaccggcaaaggatttaccggcaacgggcagcggttgcccggaggcaatatcggctaaacgcaccgcgtagccgtccattgcggagttatcaaaccccggaacatcaagcgggctaacgacatcgctcgccagaatacgaccaaaacactgtaccagtggcagcgtttcctgggcggtcagtggggtgacgcgagaaagcatctcattaagcgcggtgtcgaggctcatcaatccggtggtaaattccatgaaaacactcctgcggaggcaaaatcgaatttgcctattatgtcagaaaaacgccacagactgtatgccacctcgggcgtagcgctgggtcctgcctttacatgccatatccatctttctatattcaaaaattgaatgagtaattcataaaaattctgatatttatagcaaaagtggcgaaccacccttaatggacgaatactatgggcaaagcagtcattgcaattcatggtggcgcaggtgcaattagccgcgcgcagatgagtctgcaacaggaattacgctacatcgaggcgttgtctgccattgttgaaaccgggcagaaaatgctggaagcgggcgaaagtgcgctggatgtggtgacggaagcggtgcgtctgctggaagagtgtccactgtttaacgccggaattggcgctgtctttacgcgtgatgaaacccatgaactggacgcctgtgtgatggatggtaacaccctgaaagccggtgcggtggcgggcgttagtcatctgcgtaatccggttcttgccgcccggctggtgatggagcaaagcccgcatgtgatgatgattggcgaaggggcagaaaattttgcgtttgctcgtggcatggagcgcgtcagcccggagattttctccacgtctttgcgttatgaacaactactggcagcgcgcaaggaaggggcaaccgtcctcgaccatagcggtgcgccactggatgaaaaacagaaaatgggcaccgtgggggccgtggcgttggatttagacggcaatttggcggcagccacgtccacaggcggaatgaccaataaattacccggacgagttggcgatagtcccttagtgggtgccggatgctacgccaataacgccagtgtggcggtttcttgtaccggcacgggcgaagtcttcatccgcgcgctggcggcatatgacatcgccgcgttaatggattacggcggattaagtctcgcggaagcctgcgagcgggtagtaatggaaaaactccctgcgcttggcggtagcggtggcttaatcgctatcgaccatgaagggaatgtcgcgctaccgtttaacaccgaaggaatgtatcgcgcctggggctacgcaggcgatacgccaaccaccggtatctaccgtgaaaaaggggacaccgttgccacacagtgatgaacttgatgccggtaatgtgctggcggttgaaaatctgaatattgcctttatgcaggaccagcagaaaatagctgcggtccgcaatctctcttttagtctgcaacgcggtgagacgctggcaattgttggcgaatccggctccggtaagagtgtgactgcgttggcattgatgcgcctgttggaacaggcgggcggtttagtacagtgcgataaaatgctgttgcagcggcgcagtcgcgaagtgattgaacttagcgagcagaacgctgcacaaatgcgccatgttcgcggtgcggatatggcgatgatatttcaggagccgatgacaagcctgaacccggtatttactgtgggtgaacagattgccgaaagtattcgtctgcatcagaacgccagtcgtgaagaagcgatggtcgaggcgaagcggatgctggatcaggtacgcattcctgaggcacaaaccattcttagtcgttatccgcatcaactctctggcgggatgcgccagcgagtgatgattgcgatggcgctgagttgccgcccggcggtgctgattgccgatgagccaaccaccgcgctggatgtcactattcaggcgcagatcctgcaattaatcaaagtattgcaaaaagagatgagcatgggcgttatctttatcactcacgatatgggcgtggtggcagagattgccgatcgggtactggtgatgtatcagggcgaggcggtggaaacgggtaccgtcgaacagatttttcatgcaccgcaacatccttacacccgtgcgctgttagctgctgttccgcaacttggtgcgatgaaagggttagattatccccgacgtttcccgttgataagccttgaacatccagcgaaacaggccccccccatcgagcagaaaacggtggtggatggcgaacctgttttacgagtgcgtaatcttgtcacccgtttccctttgcgcagcggtttgttgaatcgcgtaacgcgggaagtgcatgccgttgagaaagtcagttttgatctctggcctggcgaaacgctaagcctggtgggcgagtctggcagcggtaaatccactaccgggcgggcgttgctgcgcctggtcgaaagccagggcggcgaaattatctttaacggtcagcgaatcgataccttgagtcccggcaaacttcaggcattacgccgggatattcagtttatttttcaggacccttacgctagcctggacccacgtcagaccatcggtgatagcattatcgaaccgctgcgtgtacacggtttattgccaggtaaagacgcggctgcacgcgttgcgtggttgctggagcgcgtgggcctgttacctgaacatgcctggcgttacccgcatgagttttccggcggtcagcgccagcgcatctgcattgctcgcgcgttggcattgaatccaaaagtgatcattgccgacgaagccgttagcgcgctggatgtttctattcgcgggcagattatcaacttgttgctcgatctccagcgtgatttcggcattgcgtatctgtttatctcccacgatatggcggtggtagagcggattagtcatcgtgtggcggtgatgtatctcgggcaaattgttgaaattggtccacggcgcgcggtcttcgaaaacccgcagcatccttatacgcgtaaattactggcggcagttccggtcgctgaaccgtcccgacaacgaccgcagcgtgtactgctgagcgacgatcttcccagcaatattcatctgcgtggcgaagaggtggcagccgtcagcttgcaatgcgtcgggccggggcattacgtcgcacaaccacaaagtgaatacgcattcatgcgtagataacattcaggcggagaataaaatggcaagagctgtacaccgtagtgggttagtggcgctgggcattgcgacagcgttgatggcatcttgtgcattcgctgccaaagatgtggtggtggcggtaggaagcaatttcaccacgctcgatccgtatgacgcaaatgacacgttatctcaggccgtagcgaaaagcttttaccaggggctgttcggtctggataaagagatgaaactgaaaaacgtgctggcggagagttataccgtttccgatgacggcattacttacaccgtgaaattgcgggaaggcattaaattccaggatggcaccgatttcaacgccgcggcggtgaaagcgaatctggaccgggccagcgatccggcgaatcatcttaaacgctataacctgtataagaatattgctaaaacggaagcgatcgatccgacaacggtaaagattaccctcaaacagccgttcagtgcgtttattaatattcttgcccatccggcgaccgcgatgattagtccggcagcgctggaaaaatatggcaaggagattggtttttatccggtgggaaccggaccgtatgaactggatacctggaatcagaccgattttgtgaaggtgaaaaaattcgcgggttactggcagccaggattgcccaaactggacagcataacctggcgtccggtggcggataacaacacccgcgcggcaatgctgcaaaccggtgaagcgcagtttgctttccccattccttacgagcaggccacactgctggagaaaaacaaaaatatcgagttgatggccagtccgagtattatgcagcgttatatcagtatgaacgtgacgcaaaagccgttcgataacccgaaggtccgtgaggcgctgaattacgccattaaccgtccggcgctggtgaaagttgcctttgcgggctatgcaacgccagctactggtgtggtaccgccaagtatcgcctacgcgcaaagttataaaccgtggccttacgatccagtgaaagcgcgcgaattactgaaagaggcgggatatcccaacggtttcagtaccacgctgtggagcagtcataaccacagcaccgcgcagaaagtgctgcaatttacccagcagcagttagcgcaggtcgggattaaagcccaggtgactgcgatggatgccggacagcgggcggcagaagttgaaggtaaagggcaaaaagagagcggcgtgcggatgttctacactggctggagcgctagtaccggcgaagcggactgggcactaagcccgctgtttgccagccagaactggccaccgacgctgtttaataccgcgttttacagcaataaacaggtggatgacttcctggctcaggcactgaaaactaatgatccggcggaaaagacccgcttatataaggcggcgcaggatatcatctggcaagaaagcccgtggatcccgctggtggtagaaaaactggtgagcgcacacagtaaaaacctgaccggtttttggatcatgccagacaccggcttcagctttgaagacgcggatttgcaataagcaacgcagggagtggaatgcttaattacgttatcaaacgcttactggggttgattccgacgctgtttatcgtcagcgtgctggtgtttttatttgtccatatgctgcccggcgatccggcgcgattgattgccgggcccgaagctgatgcgcaggttatagaactggtgcgtcagcagctggggttggatcagccgctgtatcaccagttctggcactatatcagcaatgctgtgcagggggattttggcctgagcatggtgagccgtcgtccggttgccgatgagattgccagccgctttatgccaacgctgtggctgaccataaccagtatggtctgggcggttatatttggtatggcggcgggaattatcgccgccgtctggcgtaaccgttggccggatcgattgagtatgaccattgcggtgagcgggatcagctttccggcatttgctctggggatgcttttaattcaggtattctccgttgaactgggctggctgcctaccgtgggagcagacagttggcagcactacattttaccctccctgacgctcggcgcggcagtggccgccgtgatggcgcgctttacccgcgcgagctttgtcgatgttttaagcgaagattatatgcgtaccgcgagggcgaaaggggtgagcgaaacctgggttgtcctcaaacacgggctacgtaacgcgatgatcccggtagtgaccatgatgggcttacagtttggctttttgctcggtggttccatcgttgtggagaaagttttcaactggccgggacttggacgcttactcgttgactccgtagaaatgcgtgattacccggtgattcaggcggaaattctgcttttcagcctggaatttattcttatcaacttagtggtggatgtgctttacgccgccattaacccggctatcaggtacaagtaaggatgcgactatttaactggcgacgtcaggcggtgttaaacgccatgccactggtcaaacctgaccaggtacgtacaccgtggcatgaattctggcgacgatttcgccgtcagcatatggcgatgaccgccgcattattcgttattttattgattgtggtggccatttttgcacgctggatcgctccctatgacgccgaaaattattttgattatgacaatctgaataacggaccttctttgcagcactggtttggcgtcgatagtctggggcgtgacattttcagccgtgtcctggttggtgcgcaaatcagcctggcggcgggcgtgtttgccgtgtttatcggtgcggcgatcgggacgttgctgggcttgctcgctggatattatgaaggctggtgggatcggctgatcatgcgcatttgcgatgtgctgtttgccttcccgggtattttactggcgatcgctgttgttgcggtgttgggaagcggcattgctaacgtgattattgcagtcgccattttttccatccccgcgtttgcccgcctggtgcgcggcaacacgctggtgttgaaacagcaaacctttattgagagtgcacgcagtattggtgccagcgatatgaccgttttgttgcgtcatatcctgcctgggaccgtctcttctatcgtggtgtttttcaccatgcgcattggtaccagcattatctctgccgccagcctcagttttctcggcctcggtgcgcagccgccgacaccagagtggggagcaatgctcaatgaggctcgagcggatatggttatcgcgccgcatgtcgctgtttttccggccctggctatttttctgaccgtactggcgttcaatttgttgggcgatggtttacgcgatgcgctggatccgaaaattaaaggataattacgtttgaatattgcttgaaagggtaatcacctcacaggaaattattgccctaagcaagtgttgtaactttctgctgattttgtagaatcgggtaatttggttaaaaagccgcagcaagggacaatttttgcagcggcacagcgttcagatagttattttgttaaatgtattaacatgctgagtttatacgaaaagataaagataaggctgataattttatttttattggcagcactgagttttattggtctttttttcatcattaactatcaactggtaagcgagcgcgcggtaaaacgtgccgatagccgctttgaacttattcagaaaaacgttggctatttctttaaagatattgaacgtagcgccctgacattaaaggacagtctgtatttattaaaaaatacagaggagattcaacgcgccgtgattcttaaaatggaaatgatgccatttttagacagcgtgggactggtacttgatgataataaatattatctttttagccggagggcgaatgataaaatcgttgtttatcatcaggaacaagtaaatggaccgcttgtcgacgagagtgggcgggttatttttgccgattttaacccaagcaaacgaccgtggagcgtggctagtgatgactctaacaacagctggaatccggcatacaattgctttgatcgtccgggtaaaaaatgtatctcttttacgctacacatcaacggcaaagatcacgatttgttagcggtggataaaattcatgtcgatttaaactggcgatatctgaacgagtatcttgatcaaatcagcgctaatgatgaagttctatttttgaaacaaggccatgagatcattgccaagaatcaactcgctcgtgaaaaactgattatttataatagcgaaggtaattataatattattgattctgtcgatactgaatatatcgaaaaaacaagtgcggtgccaaacaacgcattattcgaaatctatttttattatcctggcggtaatttattgaacgcaagtgataaacttttttatctgccgtttgcgttcattattatcgtattgctggtggtttatttaatgaccactcgtgtgttccgtcggcaattttctgaaatgacagagctggttaatacgctggcgtttttgcctgacagtacggatcaaatcgaggctctgaaaattcgtgaaggcgatgcgaaagagattatcagcatcaaaaatagcatcgcggaaatgaaagatgccgaaattgaacggagtaataaattgctcagtctgatctcttacgatcaggaaagtggttttattaaaaatatggcgattattgagtctaacaataatcagtatctggctgtggggatcatcaaactgtgtggtctggaagccgtggaagcggtgtttggtgttgatgagcgcaataaaatcgtcaggaaattgtgtcagcgaattgccgagaaatatgcgcaatgctgcgatatcgtgacattcaatgccgatctctatttacttctgtgtcgggaaaatgtacagacatttacccgtaaaatagcgatggtaaacgattttgacagcagctttggctaccgcaatctgcgcatccataagtctgccatttgtgaacctttgcagggggaaaacgcctggagttacgcagaaaaactgaaactggcgatttccagtatccgtgaccatatgttcagtgagtttattttctgtgatgacgcgaaactcaacgaaatagaagagaatatctggattgcgcgtaatattcgccatgcaatggaaattggcgaactattcctcgtctatcaaccgatcgttgatattaacacccgcgccattctgggcgcggaggcgttgtgccgttgggtgtctgcggagcgggggatcattagtccgctgaagttcattaccattgctgaagatatcgggtttatcaatgagctgggttatcagattattaaaacggcaatgggtgaattcagacattttagtcagcgtgcgagcctgaaggatgatttcttactgcatattaatgttagcccctggcagttaaacgaaccacactttcatgagcgttttaccaccatcatgaaagaaaatggcctgaaggcgaacagcctctgtgttgagatcactgaaaccgtgatcgagcgaattaatgaacatttttatctcaatattgaacaactgcgtaaacaaggggtacggataagcattgatgactttggcaccggtttgagtaacctgaaacgtttttatgaaattaatccagacagcataaaggtggacagccaattcaccggcgatattttcggtactgcgggaaaaattgtgcgcattattttcgacctggcacgctataaccggatcccggtgattgcggaaggcgtagagagcgaagacgttgcgcgcgaattaatcaaattaggatgtgttcaggctcaggggtatctgtaccagaaacccatgccattctccgcctgggataaaagtggaaaattagtaaaagagtaatttacgtatgtccagaatcaataagttcgtacttacagtcagtctgctgatttttatcatgattagtgcagttgcctgcgggatctacactcaaatggtaaaggaacgggtgtatagcctgaaacagtccgttattgatactgcttttgcggtggcaaatattgctgaatatcggcgtagcgtggcaattgatcttatcaacacgctaaatcccacggaggaacagctgttggttggtttgcgcacagcttacgccgacagcgtttccccctcttatttgtacgatgtcggtccttatctgatttccagtgacgaatgtattcaggtaaaggagttcgagaaaaattattgtgcagatattatgcaggttgtgaagtatcgacatgtcaaaaatacagggtttatctcttttgacggtaaaaccttcgtctattacctctatccggtaactcacaatcgtagtctgatatttttgcttggtctggagcgtttttctttactgagtaaaagcctggcgatggacagcgagaacctgatgttctctctatttaagaacggtaaaccggtgaccggtgatgaatataatgctaaaaacgccatcttcaccgttagcgaagcgatggagcacttcgcctatttgccgaccggattgtatgtatttgcgtataaaaaagatgtttatttgcgggtttgtacattgattattttctttgccgcattggtggcagtgataagcggtgccagttgcctctatctggtacgcagagtgattaatcgtggtattgtggagaaagaagccatcattaataaccattttgaacgcgtactggatggcgggcttttctttagcgctgccgatgtcaaaaaactctacagtatgtataacagcgcgttcctggacgacctgaccaaagcaatgggcagaaaatcctttgacgaagatttaaaagcgctgccggaaaaaggcggttatttgtgcctgtttgacgtcgataaattcaaaaacattaacgacaccttcggtcatttgctgggcgatgaagtgttgatgaaagtggtgaaaatccttaaaagtcagatcccggtagataaaggtaaagtctaccgcttcggcggtgacgaatttgcggtgatttatacgggtggaacgctggaagagttgctaagcattctaaaagaaatcgttcatttccaggtgggaagcattaatttaagtaccagtatcggtgtagcacatagtaatgaatgtcctaccgtcgaacgcttgaaaatgctggcggatgagcggctgtataagagtaagaaaaacggcagggcacagattagctggcagtaatcattattcgcaggccggacaaatgattttgcccggcctgaattaattaaacccggctaccccacaaatcgtactcatcggcgtgctcgactttcacacgcaggatatcacccggcttaacgttggtttcaccattgagataaaccgcgccgtcgatttccggtgcatctgccatgctgcgaccaatcgcgccttcttcgtccacttcgtcgataatcaccagaatttcacggcccactttctcttgcaggcgctcggcggaaatctgctgctgcagctgcatgaaacggttccagcgttcttctttaacttcttccggaacctggtcaggcagggcattggcgtctgcaccttcaaccgggctgtatttaaagcagccaacgcgatccagacgcgcttctttcaggaagtcgagtagcatctggaaatcttcttctgtctcgccagggaagccgacaataaaggtactgcgtagggtcagttccgggcagatttcgcgccactgtttgatgcgcgccagttggcgatctacagaacccggacgcttcatcagtttgagaatgcgcgggctggcgtgctgcaacggaatgtccagatacggcaggattttgccttctgccatcagtgggatgacgtcgtccacatgcggataagggtaaacgtagtgcagacgtgtccagatccccagtttgcttaactgttcgcacaggctgaccatgctggtttttaccggctcgccgttgtggaagccagtacgatgtttaacatcaacgccataggcggaagtatcctggctgatcaccagaatctctttaacgcccgcatctaccagacgtttcgcttcacttaacacttcgccaatcggacggctcaccaggtcgccgcgcatagacggaataatgcagaaggtgcagcggtgattacagccttcagaaattttcagataggcataatgacgcggcgtcagtttcacaccttgttctggcaccaggctcaggaatgggttgtgtttcggttttggcacgtagtgatgaacgtgctccagaacctgctcatagctatgaggcccggtgatttccagcactttcgggtggacttcgcggatctgatcttcttttgcccccagacaaccggtcacaataaccttgccgttttcattcaacgcttcaccaatggcttccagactttcttgtaccgcgctgtcaataaagccgcaggtgttgacgatcaccatgtccgcatcgtcatagctcggtaccacgtcataaccttcagtgcggagttcggtgagaatacgctcactatcaacaaggtttttcggacagccaagggaaacaaagccgattttcggctggggagttactttgctcatagcttaaaaaatattcagttacaggaaaggtcagggcagggattctacagagttctggataaaatttgtatcgcaatctcattcgctggcggaggcgaaggaaatgtaaattttgttaattcggcgtgaagaattgatcctggacagcattttgctcaaaaaatagccatactatttaattgcaacaaggctgggaagaggaggatcgaagtatgttcgttgacagacagcgaatcgatctgctgaaccggttgatcgacgcacgcgttgacctcgccgcatacgtgcaactgaggaaggcaaaaggatacatgtccgtcagcgaaagcaatcatctacgagataacttttttaaactgaatcgcgaactgcacgataaaagcctgcggttgaatcttcatctggatcaggaagagtggagtgctcttcatcatgctgaagaagcattagcgacagccgcagtatgtttgatgagtgggcaccatgattgcccgactgttattaccgtcaacgccgataagcttgaaaattgtctgatgagcttaacgctgagtatccagagcctgcagaagcacgccatgcttgagaaggcctgaaaactaagggggagaaagcgtctcccccttcatgtttaagtttttgtaaaaatgaatttgttatctcctccactgactacgctttaagccagagtcaatccggaggcgttatgcatcgacaatcctttttccttgtgccccttatttgtctttcttccgctctctgggcggctcctgcaacggtaaatgtcgaagtactgcaagacaaactcgaccatccctgggcactggcctttttacccgataatcacggtatgttaatcactctgcgcggcggcgagttgcgtcactggcaagcaggaaaaggattatctgcgccgctttccggagttccggacgtttgggcgcacgggcagggcggcctgctggacgtggttttagcgcctgattttgctcagtctcgccgcatctggttaagttattccgaagttggcgatgatggcaaagccggaactgctgtgggttatggccgcttaagtgatgatctcagtaaagtgaccgacttccgcaccgtctttcgccagatgccaaaactgtctaccggcaaccattttggcgggcggctggtattcgacggtaaaggttatctttttattgctctgggcgaaaacaatcagcgcccgacggcgcaggatctggataaattacagggcaaactggtgcgtctgaccgaccagggcgaaatcccggatgataatccttttataaaggaatccggtgcgcgcgccgagatctggtcttatggcattcgtaatccgcaaggaatggcgatgaatccgtggagtaatgcactgtggctgaatgaacatggcccgcgcggtggtgatgaaattaatatcccgcaaaaaggcaaaaactacggctggccgctggcaacctggggaatcaactatagtggctttaagataccggaagcgaaaggggagatcgtcgccgggaccgagcaacctgttttttactggaaagatagccccgctgtgagcggcatggccttctataacagcgataaattcccccagtggcagcaaaaattatttattggcgcgctgaaagataaagatgtcattgtgatgagcgtcaacggcgacaaagtgacagaagatggccgtattttaacggacagagggcagcgaattcgtgatgttcgcactggacccgacggttatttatacgttctcaccgacgagtccagtggggaattacttaaagttagcccacgcaattaactaacgggaatcatcaccactttgcgcactgcggggcgttcagtgagttgctgataccagcgttgcagatttggacgcggtgtccaggtcaggccaacgttaaacaaattgtagatgaacggtgcgatagcgatatcgcccacaccaaactcgtcgccagagaaccattttacttttgccagttccgcatcgagcagggcaaacagggcgtcgcactctttgcaactggcatcaatggcggcctgatcgcgctcttccggtggtgttctgactaatcccatcaggatcccgcgatgagcattactgagcgtctggtttgcccagtccatccatttttccgcttccgcacgacgtgccggactgtcgatccacaggcgtttttgcccgtactgtgccgccagatagcggacaatggcgttactttcccaaagaatgagatcactttcgtcgtcacgcaacaacggcaccagcccgttagggttcatcgccagaaaatcagcatcgtgatttatcccaaactcacggcccgcgagaatttgctcataaggtagttccagttcttcgagcgtcagcaatactttttttacgttagtactattattccgaccccacagcgtaatcatactcaccccttttccgacaggcagccacaggctgaacaggactccgatggtgaagtaaagttaacttttaagcaacagctggcaaaaaaatgacaccagaagcagcgaagcggcaggatattgcataaactttaaaaactttaccaacttacggtttctttaagtttgtgtgtgcgttattaatcaccaaacttatcatacggcgatataacgtattttttttgaatggatactcgggtggcatttatgacgcaatactcctctctccttcgtggtcttgcagcgggttctgcatttttattcctttttgccccaacggcattcgcggcggaacaaaccgttgaagcgccgagcgtggatgcgcgtgcatggattttaatggattacgccagcggtaaagtgctggcagaaggcaatgcggatgagaaactggatcccgcgagcctgactaaaatcatgaccagctatgtggttgggcaggcgcttaaggccgataagattaaactcaccgatatggtgacggtcggtaaagatgcctgggcgacgggaaatccggcactgcgtggtagtagcgtaatgttcctcaaaccgggcgatcaggttagcgtggcagacttgaacaaaggtgtgattatccagtccggtaatgacgcctgtattgcgctggctgattacgttgccgggagccaggagagttttattggtctgatgaatggttatgccaaaaaactgggtctgaccaacactaccttccagacggtgcacggcctggatgcgccggggcagttcagcaccgcgcgcgatatggcattgctgggtaaagcattgatccacgatgtgccggaagagtacgccattcataaagagaaagagttcaccttcaacaaaattcgtcagcctaaccgtaaccgtctgctgtggagcagcaatctgaatgttgatggcatgaagacaggaaccacggcaggcgcgggatataatctggttgctagcgctacccagggcgatatgcgtttaatctccgtagtgttgggggcgaaaaccgaccgtatccgttttaatgagtctgagaaattattgacctggggtttccgcttctttgaaaccgtgacgccaattaaacctgatgccacctttgtgactcagcgcgtctggtttggtgataagagcgaagtgaatctcggggcaggtgaagcgggcagtgtgaccataccgcgtgggcagctgaaaaacctgaaagcgagttatacgttaacggaaccgcagcttaccgcaccgctgaaaaaaggtcaggttgtcgggaccattgatttccagcttaacggtaaatccattgagcagcgtccgctgatcgtgatggaaaatgtggaagagggcggattctttggtcgggtgtgggatttcgtgatgatgaaattccatcagtggttcggcagctggttctcttaatcttctgataaccggatggcgcgaaacgtcatccggttatacgtcattaatacatcaacttaatgcgctgcgtctgcgcgtacttcacatactcatcttccgggcaacaatcgctcaccacaatatcaaagcgtttcaggtcacccatgcgcgccggacgcaccttgccaaatttactgtggtcgacaaccagcacatgcttttgcgccatgctcatggcccagtgttttaccggcaactcttcaagattaaaacaggtagcgcctttactgacatgcacgcccgccgcagaataaaaagcgatatccgggcaaaaattattcagcgtttgctgaaaatcgatgggtttgaaaatggcgttgctggcgtgaaattcaccaccgcaaagaaacgcgcggcaatggggtttctctttcagcgccagaaaggtatttaggctataacaaacggcggtaaaagggatttcattatcaatcgcttcaataatccacggcgtggtggtgccacagtcaaaaaagagggtctgatcgggttctaccagcgtcgcagccagttttgccgcccggcgtttttcttccaccaggcgggatttttgatcgcttaacaggtaatggctggcactgcgcggttccagaacaatatagccgccgagcaaaacgacgggcgcactgtggttgttcagatcgcgacgaatcgtcatctcgctaaccccaagcagggcggcggcgtctttaagatgtaacttatcgctgcgttttaattcttgcagcagctgcccgatacgctcttcgcgacgtgtttccataatccctctgaatagttattgaagcgagccgctcaatactacactttttagcagagatcagtcacgcacccagcctttgcggatcggtaatgcaaaacagacgcgataccagctttgcagacgttgatagagtttatgccccatcgcttgccagataatctgggcactaaggcagccaatcatacctgccagcaatccaccgagcatatccagcggccagtggacgccaagataaacgcggctccaggcaatgacgacggccagcaccattaaaagactgccggaccacaggcgatgccagcataaaaatgccagtgcaaaggtgaaaatcaccgtaccgtgatcgcttgggaaactgtcatccgccgcatgatgcaggaagttatagccgatattttcgacaaagggtcggtcgtgcggaaaaagatgtcccatcgtccaggacacaaacaggctgaccgccagcgcgatagcgatttttatcaccagttgccgttgtgctgtaagcccccacaaccaaagtaccacggccagcaacggcaccacggtaatcaaatctttagcaataaaaatcgccaagctgatcatccacggagcgctgtctggcgtcgcgttaataagagagaatagagagagattcaaattttccagcataacttcccgacgcaaagtgattaaaagggagccaatacaggcaagtcgttgagaataaagtgcaggttaaactgggtaaagcggcatcgtcttatttccctcaagcggcctgtttacggtgggtgattgtaacgggcataggttaaataaaacttaaagaaagcgtagctatactcgtaataatgtaagaatgtgcttaaccgtggtttcagctacaaaattcgctttctcgttagctgcgcttttattaaactctgcgcgattattattggcgaagaaattgcatgcaaaataaattagcttccggtgccaggcttggacgtcaggcgttacttttccctctctgtctggtgctttacgaatttagtacctatatcggcaacgatatgattcaacccggtatgttggccgtggtggaacaatatcaggcgggcattgattgggttcctactagcatgaccgcgtatctggcgggcgggatgtttttacaatggctgctggggccgctgagcgatcgtattggtcgccgtccggtgatgctggcgggagtggtgtggtttatcgtcacctgtctggcaatattgctggcgcaaaacattgaacaattcaccctgttgcgcttcttgcagggcataagcctctgtttcattggcgctgtgggatacgccgcaattcaggaatccttcgaagaggcggtttgtatcaagatcaccgcgctgatggcgaacgtggcgctgattgctccgctacttggtccgctggtgggcgcggcgtggatccatgtgctgccctgggaggggatgtttgttttgtttgccgcattggcagcgatctcctttttcggtctgcaacgagccatgcctgaaaccgccacgcgtataggcgagaaactgagtctgaaagaactcggtcgtgactataagctggtgctgaagaacggccgctttgtggcgggggcgctggcgctgggattcgttagtctgccgttgctggcgtggatcgcccagagcccgattatcatcattaccggcgagcagttgagcagctatgaatatggcttgctgcaagtgcctattttcggggcgttaattgcgggtaacttgctgttagcgcgtctgaccagccgccgcaccgtacgtagcctgattattatgggcggctggccgattatgattggtctattggtcgctgctgcggcaacggttatcagtagccacgcgtatttatggatgactgccgggttaagtatttatgctttcggtattggtctggcgaatgcgggactggtgcgattaaccctgtttgccagcgatatgagtaaaggtacggtttctgccgcgatgggaatgctgcaaatgctgatctttaccgttggtattgaaatcagcaaacatgcctggctgaacgggggcaacggactgtttaatctcttcaaccttgtcaacggaattttgtggctgagcctgatggttatctttttaaaagataaacagatgggaaattctcacgaagggtaaaaaaatgcctgactgctttgtgcgatcaggcattctcgaattaatggtgatggtcgtcaatctggtgttcgataaccatcccttcacctacgctggcaagatggcgaacataaggatgcgggcggtaagccggagctggcgcaggagccacatagacggtttgcggcacagtcgcgacgctgaccgcttgtggaacgctgacactatcaggaaccacaaccactttgtatccactcggcacatcgacggtgacactttgcgccatcgccacaccagtaaagcccattaaaagcgcgcccaacagtagacaatttttcataatcatttcgcctgaaataatgcagcgggttaatttccgcgaattatgcagccttcattcaggcattgtgttgccgggcgtgctgccggttttattggtcaaatggcgcttcgtgtttaagaactttatcgatcacatccagtacgccttcacggttattggagcctgcgcggtattttgccgctgcgacgaccgcgctaccggcattttccattgcaaaactaaagcctgcctgacgcagcatctcaatatcgttaccgccatcgccaaagaccaccacttcgctgtcgtctattccccataatttctgcagttggcgaaggccattggctttatgtacgccggggataatcagatcgatgctgccgttgccggtgtggacgctcaccataatatcgccgatggcctcatgtaatgctttttgtacttgtggaatcagttcatcggaaagattcaggccaaacttaaagaagatatcctctaagttgtcaaagttatcgacgtattccagacggtgataatacatttccgccaccgttttcatggcatcgtcatattttttgagtgtataggcactattttttccgcaggcaataatttccacttccgggcgcgtcagcaaatgttccacgacagtagcaaacgcatccttgcttagctcgccattaaaaacatctttgccttcgctcactacccagccgccgttttcagccacaaaggcaatttcattagcaatttcagggaagaaagagatcaactgataatattgattcccgctggcgactacaaagcgaattccttgtgctttcatttgctgatactgagccataaaccgctcacggttataggttttttgatcgcttaagaaagtaccatccatgtctaccgcaattaatttaatgctcatcaactattctccatcgccgtctgcgttttggtatcgggtttggcgacggctttcgcgacaatagccgcgagaataaccagcgccagtacaaccagcattgcactacgtaatccataatgttcgccgagatagcccagcagcggcggcccgacgaggaaagccagataaccggtcgttgctaccacactgacgcgggttggtgcatcggggccggtatcgctggcggcagaaatggtcagcgggaagcccaggctggcacccagtccccagagtacaacagacaccccagcgacccaggcgctatcgacaaaaataatcagcccaatacccaacgcccccattagtgcactggcccgaaccacggcaacgcgactgtaacggtcgatgaaccaaccgccggtgaagcgtccaacggtcatccccagggtaaaaccggcataaatcaggctgccggaagtagggctaaaaccgtgaccgtcaaccattaataagggtaaccagtcgttggcagaaccttcggcaaaggccatcgccagcaccacaacacctatcagcagcaactggatatcgcgataaaaaggtacgcctttttcgccatgctgggtgccatcggcagcatttttgcccgtaccgtcagggattgcctgaatggcgatataaataggtgcgatacctaccagcgccgccaataaaatgtgcaccgttgccggaacgccaaaggccgtcagtgccatcccgacacctgcgcctgccagcgtgcccaggctataaaaaccgtgcatcatcggcaaaaccgtcttattcatttctcgctcaacggcagcaccttcaacgtttatcgccacttccgcagaaccaaaacttgccccaaagacgccgagaccaacggcaaagagcagggggcttgtcagccagagtgccagacttaatatcatcatcccgatcaatgcgcaggacatcgtgaccaggatgacattacgtgtcccaaagcgtttcactaaccacgcgctgcagagaataccgctcatgctaccgatgctcagaccaaagagaacaccgcccatttcagcgatgctgacagagagaatatcgcggatagcaggcgtacgggttgcccaggacgccattaacaggcctggcaaaaagaagaacataaacagcgcccaggttcggcgtttcaatgcattacgactagaatttacggtcatagatcacgtcaaaataagaagagggaagacaacattagcaaggttgtgtacatttgtacacaattgcagagagaggaaatgacatgcgtcgcgctaacgatccgcaacggcgagaaaaaattatccaggccacgctggaggcggtgaaactttacggaatacatgctgttacgcaccgcaaaattgctacccttgccggggtaccgttgggaagcatgacctactattttagtggaattgatgagttgttactggaggcgttcagcagttttactgagatcatgtcccggcaatatcaggcattttttagcgatgttagtgatgctccgggcgcatgccaggctatcaccgatatgatctacagcagtcaggttgcaacgccggataacatggagctgatgtaccagctctacgcgctggctagccgaaaaccgctattaaaaacggtaatgcaaaactggatgcagcgcagtcagcaaacgctcgaacaatggtttgaacccggaaccgcccgcgcgcttgatgcgtttattgaggggatgacgctgcattttgtcaccgaccgtaagccgctaagccgcgaggagattttgaggatggttgagagggttgcagggtaatagataagttttagataacaaaaaacccatcaaccttgaaccgaaatggcggggttgatgggctccacaaaatggggacatcaaagaaaagcagtggcactaattaagactgatgccctgcggaaaagttctgcggttgtgcaaaaaaatttcattttcagggcaacttcagttttatcctaatcctggccataccatgacgatgattgtccctgccagcgtcagcaggacgttggcgattgcataggtgcccgcatagcccagcgccgggatgttactgcgagctgtatcactgatgatctccattgccggcgcgcaggtacgtgcgcccatcattgcgccgaacaacagcgcgcggttcattcgcaatacataagcaccgaacaagaaacagataaccacgggcaccagactgacaatcaatccggcaatcaacatctgaccgccaatcgcgcccaggccgttattaataccgctaccggcgctcagaccaacgcctgccataaacaccatcaagccgaactctttcaccatgcttaatgcaccctgcggaatgtaaccgaaggtcgggtggttagcacgcataaagcccagcataattccggcgaataacaacccggcagcgttccccatgccgaaactgaatgtgctgaactggaaggtgatcatcccgatcatcagcccaataacaaagaaggcgcagaatgccagcaggtcagtgacctggctgtgaatgctgataaagccgatgcgatcggcgatggtttttacgcggcgggcatcgccgctgacttgtaaaacgtcacctttgttaagcacgacgttgtcatctatcggcatctcaatctggctacgaatgacgcggttaaggaagcaaccgtgatcggtcaacttcagttgtgcgagacgtttacctacagcgttatggtttttaacgaccacttcttcagtgacgatacgcatgtcgagaaggtcacgatcgaaaacttctttaccgttacggaagctgggatcgagtcgggcatgggcgtcgggatagcctaccaacgctatttcatcgcccatttgtagcacggcatcaccgtctggatttgccagaatcccgttacgtcgaatacgttcaatgtagcagccggtttgtcgataaatacccagttcacgcagatttttgccgtcggtccaggccaccagttccgggccgacgcgataggcgcggatcaccggtaaataaaccttacggttggcatcagtgtccaggccacgttcgcgggcgatttgctgggcgctggtctgtaagtcctgatgctgcaatttcggcaagtaacgcgcaccaacaatcaaactcaccagaccgattaaataggttaaggcatacccgaggctcagattatccagtgccagactgagctgcctgctttccatgccggaatgacgcagtgtatcgccagcaccgaccagaaccggtgtgctcgtcatagagcctgctaacataccggccgtcaggccaatatcccagccaaacagcttacctaaccctaaggcgatcaccagcgcactgccaaccatcaccagtgctaacattaggtaatttttcccatcgcgaaaaaaaatggaaaaaaagttcggtccggcttcgaccccgacgcagaaaataaacagcataaagccaagattaagcgcatcggtgttaatgctgaaatgttgttggcctaataacaggcttacgactaaaacgccaatggaattacccagttggatgctaccaagtcgtaactttccgagacatagcccaagcgcgaggaccacaaataataacagaatgtaattcccatttaacaattcggcgacgtttatattcacggaggctaacttcttgtttactagtaagctgttgaaagaaatggtaatttacgataatgttttttaccagaattcagggcgcagattcattcagcgcacctaaacgatagtaaagtaacaatatattttactagtgtaatcacattaggtatcaacggctatatgaattgcgttggcctatattagcatggaatgcgaagcggctttatcttactgaacgccacactggcgaaaaatgtgttcgatagacgcagtgtcaggaggaacgagtgaaacataaacaacgttgggcgggggcaatctgctgttttgtcctcttcattgtggtgtgcctttttctggcgacgcacatgaaaggcgcttttcgggctgccgggcatcctgaaatcggcttgctatttttcattcttcctggagcagtcgccagcttctttagtcagcgtagagaagtcctgaaacctctgtttggcgcaatgctggcggcaccctgtagcatgctcattatgcggctgttttttagtccgacgcgcagtttctggcaagagctggcatggttactaagcgcggtgttctggtgtgcgctgggggcactgtgtttcttatttatcagtagtttgtttaaaccacagcacagaaaaaatcagtaaagccctcaacgcgagggcttgtcagacgatcaggcgtccagattttctttcacccatgcagcaaaatcggtatagccgccgatatgttgctgatcgacaaaaatctgcggcacggtttctacgggtttacctgccttttgttgtagatcttctttagtgatcccttccgcacgaatatctacatactgatactgaaaatcatcgcgttcattgctcaatttctcagccagatcttttgcacgcacacagtaagggcaaccgctacgaccaaaaataacggtttgcattatttctctcctcatagatttatgcctgtaatgatcacgctaaaatgtattcgctgaaagtaggtttaacctgttgcattaattgctaaaagctataactgttaaacacaatacagtgaaaagttttagactgaaggctcactttgcagagggaagcgtatgcgcgcgatcggtaaattgcctaaaggcgtgttgatactggaatttatcggaatgatgctactggcggtggcgctgctgagcgtaagcgactccctgagcctgcctgagccattttctcggccagaagtgcagattctgatgatttttctcggtgttttgctcatgcttcccgctgcggtggtggttattcttcaggtggcaaaacgtcttgccccacagctgatgaaccgtccaccgcaatatagtcgtagtgaaagagaaaaagataatgacgccaaccattgaacttatttgtggccatcgctccattcgccatttcactgatgaacccatttccgaagcgcagcgtgaggcgattattaacagcgcccgtgcgacgtccagttccagttttttgcagtgcagtagcattattcgcattaccgacaaagcgttacgtgaagaactggtgacgctgaccggcgggcaaaaacacgtagcgcaagcggcggagttctgggtgttctgtgccgactttaaccgccatttacagatctgtccggatgctcagctcggcctggcggaacaactgttgctcggtgtcgttgatacggcaatgatggcgcagaatgcattaatcgcagcggaaagcctgggattgggcggggtatatatcggcggcctgcgcaataatattgaagcggtgacgaaactgcttaaattaccgcagcatgttctgccgctgtttgggctgtgccttggctggcctgcggataatccggatcttaagccgcgtttaccggcctccattttggtgcatgaaaacagctatcaaccgctggataaaggcgcactggcgcagtatgacgagcaactggcggaatattacctcacccgtggcagcaataatcgccgggatacctggagcgatcatatccgccgaacaatcattaaagaaagccgcccatttattctggattatttgcacaaacagggttgggcgacgcgctaaaaccgccacgtcgatgtatgatacgcgggcttttgaccaggtctgacagagaggtgcagggtgaaaattgccatattgtcccgggatggaacgctctatagctgtaagcggctgcgtgaagccgctatacagcgcggtcacctggttgaaattcttgatccgctttcttgctacatgaacataaatcctgcggcgtcttctattcactacaaaggccgcaagttaccccattttgacgcagtgatcccgcgtattggcaccgccattaccttttatgggacggcggcactgcgccagttcgagatgctggggagctatccgctcaatgagagcgtcgccattgcccgggcgcgtgacaaattgcgttccatgcaactgctggcgcgtcagggcatcgacctgcctgtcacgggcattgcgcatagcccggatgataccagcgatttaatcgacatggtcggtggtgcgccgctggtggtcaagttggttgaaggcacgcagggaattggcgtcgtgctggcggagacgcgtcaggcggcggaaagcgtgattgacgctttccgcggtctgaacgcgcatattctggtgcaggaatatatcaaagaggcgcaagggtgcgatatccgctgtctggttgttggcgatgaagtggtcgctgcgattgaacggcgggcgaaagagggcgattttcgttccaatttgcatcgtggcggcgcggcaagcgtcgccagtatcacaccacaggagcgtgaaatcgcgataaaagccgcgcgaacgatggcgctggacgttgctggtgtggatattctgcgtgctaatcgcgggccgttggtgatggaggtgaatgcgagcccggggctggaaggaatagaaaaaaccaccggtatcgacatcgcgggtaaaatgatccgctggatcgaacgccacgctacgacagaatattgcctgaaaacgggtggttaatcgcaatcacattactgatcatggttttgcctgcgctttttgcgtaagctgtgccggtctttttatcgaaagaggttgtacaaaattatgacaagcctggtcgttcctggtctggatacgctgcgtcaatggctcgatgacctggggatgagtttttttgaatgtgataactgtcaggctctgcatctgccccatatgcagaatttcgacggtgtctttgatgccaaaatcgatctgatcgataacacgatcctgttttctgccatggcggaagtccgacctagtgccgtattgccgctggcggcggatttatctgccatcaatgccagtagcctgaccgtgaaagcatttcttgatatgcaggatgataatctgccaaagctggtggtttgccagtctttatccgttatgcagggcgtaacctatgagcagtttgcatggttcgtgcgtcagagcgaagagcagattagcatggtcattcttgaagctaatgcccatcaactgctgttaccgactgatgatgaagggcaaaacaacgttaccgaaaactatttcctccactgataactcctttcgagcacgcagtcgctggtgcagtggctgcgcgctgcaaaattatctgctgtttttaaccttttcttaaagattatttcacttctcttgtgtcgatttggctttatcacatagagcaaatatgcataaaaatttgttaaataccgttttttaatccgagctatagtctcaaaccctggctaaagttattcttgcgatgcttttatatagcgagcagtgctggccgggagaaagttctcttttcttacaccgcgccgataaaaaatatgcacgtttattgcatatctttcagtgtgacaacttttgttcgtttgttaacgaactttcagaaggaaagagatatgaccgccttaaataaaaaatggctaagcggtctggttgcgggtgctctgatggccgtctctgtcggcacgctcgcggctgaacaaaaaacactccacatttataactggtctgattatatcgccccggacacggtggccaattttgaaaaagaaaccggtattaaagtcgtctacgatgttttcgactctaacgaagtactggaaggcaaattaatggccgggagtaccggctttgatctggtggttccatctgccagctttctggagcgccagttgactgcgggagttttccagccgctggacaaaagcaaattgccggagtggaagaatctcgacccggaactgctgaagctggtcgccaaacacgatcccgacaataaatttgctatgccctatatgtgggcgacgaccgggattggctataacgttgataaagttaaagcggtgctgggcgaaaacgcgcccgtcgatagctgggacttgatcctcaaacctgaaaatctggaaaaactgaaaagctgcggtgtctctttcctggatgcgccagaagaagtttttgctaccgtgttgaattatctcggcaaagatcccaacagcactaaagcggatgattacaccggaccggcaacagatctgctgttaaagctgcgcccgaacattcgttatttccatagttctcaatacattaacgacctggcaaacggcgatatttgcgtcgctatcggctgggcaggtgatgtctggcaggcgagtaaccgcgcgaaggaagcgaagaatggcgtgaatgtcagcttcagcattccaaaagaaggggcgatggcgttctttgatgtattcgccatgcctgcggatgccaaaaacaaagacgaagcctatcagttcctgaattacctgctgcgcccggatgtagtagcgcatatttccgaccatgtgttctatgccaacgccaataaagcagccacgccgctggtgagtgcggaagtccgtgagaacccaggtatttatccgcctgcggatgttcgtgcgaagctgttcactctgaaagtgcaggatccgaaaatcgaccgtgtgcgcacccgcgcgtggaccaaagtgaagagcggaaaataatccgcagtcgtagatgccggaggggcgcaccacacccgccggcaattcgcaccattatggtgcgcttgcacacattcaatgccggagagcagccgtgaatgacgctatccctcgcccgcaggcgaaaacccgtaaggcgctgacgccgctattagaaatccgcaacctgaccaaatcctacgatggtcaacatgcggtggatgatgtcagcctgaccatctacaaaggtgaaatcttcgcgctgctgggcgcatccggctgtggcaagtccacgctgctgcgtatgctggcaggtttcgaacaaccttctgccggacagataatgcttgatggcgtcgatttgagtcaggttccgccttacctgcgccccatcaatatgatgtttcagtcttacgcgctgtttccgcatatgaccgtggaacagaacatcgcttttggcctgaaacaggacaaactaccgaaagcggaaattgccagccgggtcaatgagatgctcggcctggtgcatatgcaggagttcgccaaacgcaaaccgcatcagctttccggtggtcagcgacaacgtgtggccctggcccgaagccttgcgaagcgcccgaaactattactgctcgatgagccgatgggcgcgctggataaaaagctgcgtgacaggatgcagcttgaagtggtggatattctggagcgcgtcggtgtgacttgtgtgatggtcacccacgatcaggaagaggcgatgaccatggcggggcgcatcgccattatgaatcgtgggaaatttgtccagattggcgaaccggaagagatctacgagcatccgactacccgctatagcgccgaatttattggcagcgtaaacgtctttgaaggcgtactcaaagagcgtcaggaagatggcctggtgcttgatagcccggggctggtgcatccactgaaagtcgacgcggatgccagcgtggtcgataacgtgccggtacatgtggcgctgcgcccggaaaaaatcatgctttgcgaagagccgcccgccaatggttgtaacttcgcggtgggggaggtgatacacattgcctatctcggcgatcttagcgtgtatcacgttcgtctgaaaagtgggcagatgattagcgcccagctacaaaacgcccatcgtcatcgtaaagggttaccgacctggggcgacgaagtgcgtttgtgctgggaagtggacagctgtgtggtgctgacggtttaaggagcaaagatgagtacacttgaacctgctgcccagagcaaaccgccgggcggatttaagctgtggttgagccagctgcaaatgaagcatgggcgcaaactggtcattgcgttgccatatatctggttgatcttgctgtttctgctgccatttctgattgtctttaaaataagcctggcggagatggcgcgcgctattccaccttataccgaactgatggagtgggctgacgggcaactgtccatcactcttaatctcggtaattttctgcaactgaccgacgatccgctctatttcgatgcttatctccagagcctacaggtggctgcgattagcacattttgctgtttactgatcggctatccgctggcgtgggcggtggcgcacagtaagcctagcacccgtaatattttattactactggtgatcctgccgagctggaccagctttctgatccgcgtttatgcctggatgggaatattaaaaaacaacggtgtgctgaataattttctgctgtggctgggggttatcgatcaaccgctgaccattctgcataccaatctggccgtttatatcggcattgtttacgcttacgtgccgtttatggtactgccgatttataccgcgttgattcgtattgattatagcctggtggaagcagcgctggatctcggtgcacgaccgctgaaaacgttctttactgtgatcgtgccgctgactaaaggtgggattattgccggaagcatgctggtgtttatcccggctgtgggcgagtttgtgatcccggaactgctcggtggcccggacagcatcatgatcgggcgcgtgctatggcaagagtttttcaataaccgcgactggccggtggccagcgcggtagcgatcatcatgttgctgctgctaattgtgccgataatgtggttccacaaacaccagcaaaaaagcgtgggagaacacggatgaataatttaccggtagttcgtagcccctggcggattgtgattttgctgctgggctttacctttctctacgcgccaatgctgatgctggttatctatagctttaacagcagcaagctggtgacggtgtgggccggctggagtacgcgctggtatggtgagttattgcgcgatgacgcgatgatgagtgcggttggtttaagtctgacaattgcggcctgtgcggcgacggcggcggcgatcctcggaactattgcggcggtggtgctggtgcgctttggcaggtttcgcggaagtaatggctttgcctttatgatcaccgcgccgctggtaatgccagatgtcatcacgggcttgagcctgttgttattattcgtcgcgcttgctcatgccattggctggcctgcggaccgcggtatgctcaccatctggctggcgcatgtcactttttgtacggcttatgtggcggtcgttatttctagtagattgcgggaactggatcgcagcatagaagaagcagcgatggatctcggtgcgacgccgctgaaagtgtttttcgtcattacgctaccgatgatcatgcccgcgatcatttctggctggttactggcttttactttgagccttgatgatctggtgatcgccagctttgtttccgggccgggagccaccacgttaccgatgctggtcttttccagcgtgcggatgggggtgaatccggaaatcaacgccctggcaacattgatcctcggcgcggtcggaattgtcggatttatcgcctggtatctgatggctcgcgcagaaaaacagcggatacgcgacatccagcgtgcaagacgtggctgaagacactaaaatttgccaacctggctacataatgccgcgcatgtcgcggcattgttttcatggaagacgaaacgttgggattttttaagaaaacatctagttctcatgctcgcctgaatgtgcctgcgctggtgcaggtggcggcgctcgccattattatgatccgtggcctcgacgtgctgatgattttcaatacgctgggcgtgcgcggtattggcgagttcattcatcgcagcgtacaaacctggagtttaacgctggtctttttaagcagtctggtgctggttttcattgagatctggtgtgcgtttagtctggtgaaagggcgtcgctgggcgcgctggctatatctgctgacacaaatcaccgccgcaagttacttgtgggcggctagcctggggtacggttatccggagctgttcagcattcccggtgaaagtaaacgtgaaatcttccatagcctgatgctgcagaagctgccggatatgctcatcctgatgctgctgttcgttcccagcaccagtcggcggttcttccagttgcaataatgtgtataatcgtcgcccctgatgatgtgaaggtcaatgtatgcagtgcgcactttacgacgcgggtcgctgtcgttcctgtcagtggataatgcagccgattccagagcaactctccgctaaaaccgccgatcttaaaaatctgctcgccgactttccggttgaggaatggtgcgcgccggtgagtggcccggaacaagggtttcgtaataaagccaaaatggtggtgagtggtagcgttgaaaaaccactgctcggtatgctgcatcgcgatggcacaccagaagacctttgtgactgcccgctttatcctgccagttttgcgcccgtttttgcggcgctaaaaccgtttatcgcccgagcggggttaacgccctacaacgtggcgcgtaagcgtggcgaactgaaatacattctgctgactgaaagccagagtgatggaggcatgatgctgcgctttgtactgcgttctgataccaagctggcgcaactgcgtaaggcgctgccgtggttacacgaacaactaccgcagctgaaagttattaccgtcaatattcagccggtacatatggcgattatggaaggggagacggagatctacctgaccgaacaacaggcactggcggagcgttttaatgacgtaccgctgtggatccgtccgcaaagtttcttccagactaatccggcggtcgccagccagttgtacgccaccgcgcgcgactgggtacgacagctgccggttaaacatatgtgggatctgttctgcggtgtggggggctttggtttacactgcgcgacgcctgacatgcagttaaccgggatcgaaattgcaagtgaggccattgcctgtgcaaagcagagtgccgctgaactgggcttaacgcgtttgcaatttcaggcgctggactccactcagtttgccaccgctcagggggatgtgccggagctggtgctggttaacccgccgcgccgcggcattggtaaaccgctgtgtgattatctcagtacgatggcaccgcgttttatcatctactccagctgtaacgcccaaactatggcgaaagatatccgcgaactgcctgggtttcgtattgaacgggtgcagcttttcgatatgttcccgcataccgcgcactatgaagtgctgacgctgctggtgaagcaataaaaaagccgcatgtgcggcttcagattgctgacaaagtgcgcgttgtttatgccggatgcggcgtaaacgccttatccggcctacaaaagcgtgcaaattcaatacattgcatgggccatgtaggcctgataagcgtagcgcatcaggcaattttacctttgtcatcagtctcaagccgcggttgcggctttctgaatcttactgtgggaaccactggtcactgattttttgataagtaccgtcagctttaattgctgccagcgcgttattcagtttttccagcagggctttgttatccggacgtacagcgatgcccaggccggtgccaaaatattgcggatcggtcactttctcagtagcaacaccaagttgtggattggttttcagccattcgtttaccaccgctgtgtcaccaaataccccatcaatacgaccatttttcagatcgataaaggcattctgataactgtcataagagacagttttcacttccgggtgctgatcctgaatatatttctggtgcgtagtaccgttttccatcccaatacgtttgcctttcagatcggcaaacgttttgtaggtatcttttttggcaatcacgacggcactgttttcatagtagggcgtggtaaagcttacctgtttgctacgctccggggtgatatccataccggagattacggcgtcatattttctgaatttcagggacgggatcaggctgtcgaacgcgtgattagtaaaagtacattctgcctgcatttgtttgcacaaggcttttgccagatcgatatcaaagccgacaatctcattattagcacctatagattcaaagggtggataggtggcactaacgccaaaattgattttctctgcggcagaagcaccgaaagtaaaggaagcaagtaaagcggcaagaactaactttttcatgatggaactcccgtctgtcaatcttatgatttttggccgtgtctgcggcatgggataacaatgccatcaagtgaatttatatgcaataaacatgattaaataatttaaatgaaataaaaaagacggacaacttagtgggttgtccgtcttcattataagaatttatgcactatgtaggccggataaggcgtccccgccgcatccggcacaggcaccgtgctgatgtctgatgcgacgctggcgcgtcttatcagacctacaaaaccccccggcgaatgtacgcagccacattaatttcgccgttcgaatgccagcgctttgcgctcgatcagacgcatcatcagcgtcagcaggccgttaacgaccaggtaaataatccctgccgcaccgaacaccattacatcgtaggtgcgtccgtacaacaactggctgtatcccatcacttccatcagcgtaatggtgtatgccagagaggtacttttgaataccagcaccacttcgttggaataagaagagaggctgcgtttaaaggcatacggcagcaggatcgccagcgtatcttttttgctcattcccagggcgctacaggactgccactgaccttccgggatcgcacgaattgcaccgtaaaacagctgcgtggtatacgccgcactattcaggctcaacgcaatcagcgcacataaccacggttcactcaacaaatgccacagtgccggatactcctgcaaagtcggaaactggcccggcccgtaataaatcaggaagatctgcaccagcagcggcgtaccggtaaacagcgtgatataaccccgcaccagccacaccagcaccggcgttttcagcgtcaggatgatggtaaaaatcaatgccagaatcagtgccacaatcaggctggcaacggttagcgtcaggctggtgtgtagccctttcatcagttcgggtaaatactcaaacattagctgggcctccgctcaaaacgtgtcgcgcgcaggtcaatgcgtttgagaatgtactgactgagcagggtgatcaccaggtaaatcgccgccgccacaatgtaccaggtaaatggttcctgggtacgagtagcgatgctttttgtttgcagcattaaatcattcacactaatcaaactgaccagcgcggtatctttcagcagcaccagccactggttaccgaggccaggcagcgcatgacgccacatctgcggcatcaccagacggaaaaagatagcgcttttgctcagccccagcgcctgaccagactcccactgacccaccggcaccgctttcaacgcgccccgaagcgtttggctggcataggcggcatacagcagactcagagcgatgacaccacaaaggaacgggctaacgtcgaagttctcaatgtccatctgcactgggatctgcacgaacccaagattgatagtgaagccatcgctaagcgtcagcagcagctggctggagccaaaatagataaacagcaccaccagaatttctggcaggccacgcagaatggttaccagcgcactacctgcccacgcgacaggacgccattttgcgctctcccataccgcaaagaacatcgccagcgccagcccgacaatcaatgcacaaacggcaaggccgacggtcatcccggcggcgcttgctaaaggaaaaaattcattcatcaggaattacttctggaaccatttgttgtagatggtttcgtaagtgccatctttcttcactttttccagcgcagtgttgagtttctgctgcagctcagtgttgccctgacgtaccgcgatgccgaggccagtgccgaagtaatctttatcggtcactttgtcgcccaccgccgccagtttcgggttatctttcagccactcagtgaccactgcggtgtcaccgaagacgccgtcgatacgcccgttttgcagatccagttttgcgttctggtagctgtcatacggaacggtagtgatttccgggtgcttatccataatgaatttctggtgtgtcgtcccgttctgtacgccgacttttttgcctttcagctgatcaacactggtgtatttgccttgctgacccacaaacagggcagagttgtcatagtacggggtggtaaacagcacctgcttttcacgctccggagtgatatccatgcccgccatcacggcttctacgcgacggaatttcaggcttgggatcaggctgtcaaacgcctggttagagaaagtgcaggttgcatcaatctctttacacagcgcttgtgccaggtcgacgtcaaaaccaacgatctggttgtttgcatcaatgctttcaaacggaggataggaggcttcggtagcaaaacgaatggtttcggcagctgtggcggaaagactaaaacctgcaattaacgcggcaatcagaacttttttcattgttgttatcccgaatcttagtgagagagatagtttttaaatgcttcggtttgcggctcggtaaagcagctcgcgtcgccttgttctacgatatgaccattttccatatacaccactcggctggcggttttacgcgccacttcaacttcgtgggtgacgatcacctgggtaatattcgtttctgccagctcacgaatgatgctgacgatttgtgccgtaatttccgggtccagtgcggcggtcggttcatcgaacagcagtacctgcggttccatcatcaacgcacgggcaatagcaacacgctgctgctgaccaccagaaagatgcagcgggtaacgatcgctataaggtttgagacgcagacgttccagcagtttttctgcacgggccagcgcctgatctttactcaaccccagtacacggcagggcgcttcaatcaggttttgctgcacggtcagatgcggccacaggttgtattgctgaaacaccatgccaacgttacgacgcaaatcgcgaatcgctttgtcagagggtgttttggtgaaatcgaaatggttgcctgcaatgttgagcgtaccggagcgcggcatctcaagcagattgagtacacgcagcaggctgcttttacccgcgccgctggggccaagtaacaccagcgtttcgccctgtgggcaatccagcgtgatatcgaacagcgcctgatgcgcgccgtagaagcaattaatgccgtttaattgaatactcattgacactcgtatactggcagtctgatagctattgaggtcgaagatagtacctttgacagaataattatgcaatatttctgctttaaaagttaaaagcaaagcgcattattcaataaacatagcacaaaataacgggggcggtggtcggcgagcataaatgtcggcattcctcacgaaatgccggacaatttacggggtttattggttgatcaaggcgttagcgattctcgatggactgacggagcgtacccgccgtggcatgaacgctaccgcctaagtaacgcacatcgtcgatgacccaacactggccttcctgaatcattaacacttcatcctgccaaccctggtcaccctgtttgagatccacgcgcaatggaatgttacgggcatcacgattagggatagtgcttgcactggcaacgtgggcgctatctggcaaggtggttcgactggagaatggatcgttggtcagtagttcccgatggttattatcccgggaggcatcgctaagcagtgtcgccagtttgtcgctcagataagggcgcaaggcggtgatgtcgttgctgcggtgcaaaatgcggtagtcataaaattgctgggccacgttatccgggcctccttcaacgcaaggaccactgcgtgtgccgttatctttataagctggagtgactgtggtgcaggcactgaggagcagtgcgcaggggataagcattgtcaatttgctgtagcgcataatgatttccttataagcgatcgctctgaaagcgttctacgataataatgatatcctttcaataatagcgtatcagtctgataatgcttttgagatcgaaggcttagcaaacaaggagatcgatcatgcaattttctacaaccccaactctggaaggccagaccatcgttgaatattgcggtgtggtgaccggcgaagcgattttaggtgccaatattttccgtgatttctttgccggtatccgcgatatcgttggcggacgttccggtgcgtatgaaaaagaactgcgtaaagcacgggagatcgcctttgaggaattaggctcccaggcgcgggcgctgggggccgatgccgtcgtcggtattgatatcgactacgaaacggtcgggcaaaacggcagtatgctgatggttagcgtcagcggtacggcggtgaaaacgcgtcgatgagaagattcttctggctggtcgctgccgctctgttattggcagggtgtgcaggcgaaaaaggcattgtcgagaaagagggatatcagcttgatacccgacgccaggcgcaggcggcgtatccgcgcattaaagtgctggtgatccactacaccgcagatgattttgatagcagcctggcgacactgaccgataagcaggtcagcagccattatctggtccctgcggtaccaccgcgatacaacggtaaaccgcgcatctggcaactggtgccggaacaagaactggcctggcatgcggggattagcgcctggcgcggggcaacgcgccttaacgacacctctattggcattgagctggaaaaccgtggctggcaaaaaagcgccggagtgaaatattttgccccgtttgaaccggcacagattcaggcgcttattccactggcgaaagatattattgcccgttatcacatcaagccggaaaacgtagtggcacatgcggatatcgcaccgcagcgcaaagacgatccggggccattatttccctggcagcaactggcgcagcaggggattggtgcctggccggatgcgcagcgggttaacttttaccttgccgggcgcgcgccgcacacaccggtagataccgcgagtttgctggagcttttggcgcgctacggttatgacgttaaacctgatatgacaccgcgcgagcagcggcgcgtgattatggcattccagatgcatttccgcccgacgttatataacggcgaagcggatgcagaaactcaggcgattgccgaagcattgctggagaaatacgggcaggattaacgcggcagttttccgtggtcgcgtagccaggcggcagttttctcgataccttcatccagggtgatgaccggctgataacctaactcttcctgcgcacgcgtaatatccagcgtaaagtcaaaattcaacttggagacgccgtagtgggtcagcggcggctcttttgcactcttgcggcctaaacgctccatgctgcgggcgatcatatccagcatcgggtaggggacggaacgaatacgacagtcaatattcaactcgtcgatcagcttctgcacgatgctgcgcagtgtgcgatgctcgccgttggtgatgttgtacacacgcccggaaggtagcttatcgcaggcttcctggcttgccagccacattgcgtgcacggcattttcatagtaggtcatatcgaccagcgcactgccgccatgcggtaacagaatactgccgtagtggtgcatcatatgcgccagacggggaataaagactttatcgtgcggtccgaacagactttgtgggcgcagaatagtaaagcgcgtttgtggattcgcctggctaagcatattgatcacttcttcgctggctgctttgctgcgggcaaactcgttggcgaagcggtgagggcgaaaatcttctttaatatcgcgatggtggtgataatcgaagtacagggagggggaagagatatgaataaagttacgcacaccccaggcgacagcccattcacccaggcggcgagtggcgcgaacgttagccagatcgaaagcctgttgtgtcccccagggactggtaaagctggagcagtgccacagcgtatcaatgcccgcgagcatcactttagcttgactactaaccagctcggtcagatccgccggaacaaactctgcgcccattttttccagcaatttgcccattgcctcgttgcgaccggtcgctcgcacgctgatgcctttctggcataaaaactctaccgcgtttcgacctaagccgctggtggcgccggtaaccagtaccttcatatcaatccactgttgttgagaaaataacgtgcgcattcttccgtgatttcccccatgatgcaatgggaaacatgaaagaataacgcaggttttgtcgattaatctgtgctttgttctgccagtctggcgatttgttttgccattccgcgaaaaataaacagatgcgcggggatcatcaataaccagtaaaacagccccggcataccgtgcggatgccagaaagcgcggacatcgatagtacgatagtcgcctttatcttccaggctaaaacacagtcgtcccagccccggcgctttcatgccaaataacaacgtaagttgtttttccggttcaacgacaatcactttccagctatccaccgcatcgccagtctgtaaatattcgcgctccgggcggcctttcgccagcttatgaccgatcgcgcggtccatcaacgcccgtgtctgccacaaaatattgccaaagaaataacgctctttaccgccgatttggttcactacctgccataaagcagcaaggctggcggacgttttaacggtaaaccccgcctgtttggcaaaataaccgtactccggtcgccagcgggcaaaggcctgagcgtcgtagccccagtcgctggagttgaccagtttttcctcctctttcaacgtgctacgtaccgcgtcatcgaaagcgatcagccgttgtgggatgagtgcacgtagcgcggtatcatccgccagcagatcgtgtttcagcccctgaatcaacgccctggcggtggtgggcggtacggaagtaatcacattgagaaaccacacgctaatccagcgggtggggagggggatggggatcaaccagcggcgcttaccgctcaccgccataaaatgttcaaactgttgctgataactgagcacctctggtccggcggcttcgaagatgcggtgttcgctggccggatgatctaacaacgcaaccagatagtgcagcaagttttccagcgcaatgggcgtggtgcgactacgaacccagcgcggaggcgttaagactggcaggttgtagaccatatcgcgcatgacttcgaacgccgcggaacctgcgccaacgataattccggcccgcagttcggtcacgggtacattcgcttcacgcagaatgtccgccgtagcctgacgagcacgcagatgatcgctctgctcatgtggcggggcctgcaagctactaagaaagattaattgcttaactggtacttcacgtagcgcatcgcggacgttgagagccacctggcgctcctgagcgataaaatcgccgccttcgcccatgctgtgcaccagaaaatagaccgtatcgatatcctgcaacagggccggtaggttatccggccagctgagatcgactttatggcaactgacgtttgccagttgcagctttgcaagcctgtcgacatgacgtgccgccgccaggatctgatgcccttgctggctgagtgtgcgcaccagatgctgaccaatgtagccactggcaccgagaactaaaatgcgttgcggcacgtctctctccttaacgcgccaggaatgcacgccagtgggcggcgacttccgccagttgttcgcggctgacgtcaagatgcgtcaccaggcggacaatcgggctggcgttaatcagcacgtttctcgctttcatgtattcgcctaacgcggcagcattttcttccccgacgcgaacaaacagcatattggtgtcctgacgcatcacatccgcgcctgcttcacgcagctgctccgccatccaggcagcgttgtcgtggtcttcctgcaagcgcgcaacgttatttttcagggcatatatcccggcggcagccagaatgccggactggcgcatcccgccacctgtcattttccgccagcgaatggcacgtttaatgtaatcacgattaccgacgagtaaactaccgactggcgtcccaagacctttgctcaggcaaatggtgaagctatcacaatattgcgtgatctctttcagttcgcagccgtaagccaccacggcattaaagatgcgcgcaccgtcaacatgcagcgccagattgcgctcgcgggtaaattcccatgcttctttcaggtattcccgcggcaacactttgccgttgtgggtgttttccagactgagtaatttggtgcgggcgaaatggatatcgtcgggtttgattttcatcgccactttatccagcggtagcgtgccgtcggcagccgcgtctatgggttgcggttgaatactgcccagcaccgccgcgccaccggcttcaaacagatagttatgcgcggcctgaccgacaatatactcttcgccgcgttcgcagtgactgagcagagcgaccaggttggcctgagtgccggtaggcagaaaaatggcggcttctttaccggaaagctctgctgcgtagtcctgcagagcattaacggtagggtcgtctccgtaaacgtcgtccccaaccggggcggccatcatcgcttcgagcatggcgcggcttggtcgggtaacggtatcactgcgtaaatcaatcatggcatgtccttattatgacgggaaatgccaccctttttaccttagccagtttgttttcgccagttcgatcacttcatcaccgcgtccgctgatgattgcgcgcagcatatacaggctgaaacctttggcctgttcgagtttgatctgcggtggaatggctaactcttctttggcgaccaccacatccaccaacaccggaccgtcgatggagaaggcgcgttgcagggcttcatcaacttcagacgctttttctacacggatacccgtaatgccgcacgcttcggcaatgcgggcaaagtttgtgtcgtgtagttcggtgccgtcagtcaaatagccaccagctttcatctccatcgccacaaagcccagcacgctgttgttaaagacgacaattttcactggcagtttcatctgcactacactgaggaaatcgcccatcaacatgctaaaaccgccatcgccgcacatggcgaccacctgacgttctggctctgtcgcctgcgcacccagcgcctgcggcatggcgttagccatgctaccgtggttaaagctacctaacaggcgacgcttgccgttcatttttagataacgtgccgcccacaccgttggcgtaccaacgtcacaggtgaaaatagcgtcatcggcggcaaaatgactaatttgctgcgccagatattgcgggtgaatggctttctcgctcggtttagctaaatcgtccagccctttgcgggcgtcgcggtaatcttccagcgctttatccagaaacttgcgatcggctttttcttccaccaatggaagcaatgcacgcagagtgctcttgatatcgccgaccagtgccatatccaccttgctgtgagcgccgatgctggctgggttgatatcaatctgaatgattttggcatcggtcgggtagaaggcgcggtagggaaattgcgtgccgagtagcactaacgtgtcggcgttcatcatggtatggaaaccactgctgaagccgattaacccggtcattccaacatcatacggattatcgtattcgacatgttctttaccgcgcagggcatgaacaataggcgctttaattttcccggcaaactcaactaactctttatgcgcccccgcgcagccgctgccacacatcagggcgatattgctggaataacgcagcagttgcgccagtttgcgtaactcttcttcttccggcgtcacgactggttgtggcgcatgataccagtgcatggttgccccttctggcgcaggttttaacgccacgtcgcctggtaacacgacaacgctaacgccacggttaagcaccgctttgcgcatggcaatcgccagtacttgtgggatctgctccgggctggaaaccagctcgcaatagtgactacattcgcggaatagctcttgtgggtgggtttcctggaaatagccgctgccaatttcgctggagggaatatgagcggcaatcgccagtaccggaacgtgattgcggtggcaatcgaacaggccgttgattaagtgcaggttgccggggccgcagcttccggcgcagaccgccagttctccgctaagttgtgcttcagcgccagcggcaaaggccgccacttcttcgtggcgggtggacatccactcgatggtgcccatgcgattaagactgtcactaagaccgttcagagagtcgcctgtgactccccagatgcgtttcacccctgcgctttcgagtgttttggcgatataagctgcaaccgtttgtttcatggttctccatctcctgaatgtgataacggtaacaagtttagttcatctgacggagggggaagggatgggagagaaaggaggcactaacggttaaatagcccgatgaaaggaatatcatcgggcataaggcgattatgcgagaaccaaatccccctgcggatggcaggagcaggccagtacgtaaccttcagcgatttcggcgtcggtcagcgtcattgtgctgctcaccgtatattcaccggaaaccacttttgtcttacagcagccgcaaacacccgcacggcaggcagcgacaaccggaacgttattgctttccagcgcctccagtagcgtggtgccaaccggggcgtaaaattctcgtgccggttgcagtttggtgaatttcagaccgctggtcgccgcttctgctactggggtgaagaatttctctttaaagaaacgcgtcacgccgagcgctttcacttcctgctctacccaatccatatacggagccgggccgcaggtcatcacggtacgactagctaagtcaggtacacctgccagcagttcgcgagtgagacgaccagcgataaagccttcggtaacgttattttctgccaccagcgttaccggatagttacgccactcatcggcgaaaataacatcctgcggcgtacgcacgttgtagatcacccgcacatcggcctgtggacggttcttcgcaagccagcgacgcatgctcataatcggcgtgacgccgcagcctgccgccagcaacaggaatttatcttctgctttatcgtcgcaggtaaattcccccatcgcgtcgctaagccagagataatcaccgcgttttacatcgcgcgtcagccactgggagccgacaccgtcatcaatccgccgcacggtcagggtgatatattcactcacgcctggcgtggaggaaatggtgtaagcacgcagcgtttccgcactgtttcgcacgctgaccagtgcatattgcccggcgcgatatgggtagtaatcgtggcaaatcagggaaatcgtccacacatccggcgtttcttgcgtaatgtgatgaacctgcatccgccacgggcattgattcgttggcatcgtcatcgacaaactccttacgcgctcaacagttgcttcatgtcttcttcaacagtggtgatagaacgcaggccgaatttctcgttcagcaccgccagcaggtctggtgtcaggaaaccaggtgcagtcgggccggtgacgatatttttcacgcccagagaaagcagcgtcagcagaatgacgatcgctttctgttcaaaccaggagagcaccaggctcagcggcagatcgttgacaccgcagcccagtttctctgccagagtgacagccagaataatcgcactgtaagcatcgttacattgacctgcatctaccagacgcggcagaccttcgatatcgccaaactcaagtttgttaaagcgatatttaccacaggcgagggtcaggatcaggcagtcatccggcacgctggtggcgaaatcggtgaagtagtggcgctcgccgcgtgcgccgtcacagccaccaagcaggaagatatgacgcagtttttcacggctcaccagatcaatcagcgtatcagcagcgccaagcagcgtctggcgaccaaaacccacggtgataaggtgcggaatttcgctgtacgggaagcctgccatctgttgcgcctgggtgataaccgcagagaaatcatcaccgtccagatgacgcacgccaggccagccaacaatgctgcgggtccagatacgatcgtcataagcgcctacggttgggtcgatgatgcagttgctggtcatcacgatggggccagggaaacgagcgaactccacttgctgattctgccagccgctgccgtagttaccgaccagatgcttgaatttacgcagctccgggtagccatgcgcaggcagcatttcgccgtgggtgtagacattaacgcccgtgccttcggtctgttccagcaggttgtagagatctttgagatcgtgaccggaaatcagaatgcatttacccgccgtcgctttgacgttgacctgggttggcgtcgggtgaccgtatttaccggtttcgcctgcatccagaatgctcatcactttgaagttcatctggccgatttccatactacactcaagaagcgcgttcatatcggcaggccaggtccccagccacgccatgattttatggtactgggcataaatatcgttgtcgtattgaccgagaacatgcgcgtgttccatataggccgccgcacctttcaggccatacaggcacagcagacgcaggccgagaatgttttcgccaatcgccgctttatctttgttaggggtaaattctgctgcctgacgttgcagctcgccgagatcgtcgctcaccagttgcaggtcagccatcgggttatcgacgcgcgcgttggcatctacagccaggcattgcgctttcagcgcctcgcgcagggcaatcgcttcacgagcgtagccgacaatacgcggagaatcgaagttaacgttggtcagggtactgaaaaaggcacgtggcgcgaagctgtcaacatcgtggttgatgatgccgtattcacgcgcttttaccgcccaggcagaaagcccttgcagcgccgcgatgagtaaatcctgaaggtcagaagtttccgccgttttaccacacatcccctgcgcgtaactgcagccgtttcctgccggagtacggatagtttgttcacattgcacacaaaacatgatcacaccttttaaagttatatttaatatacatgtttaaggttaagacgcttaacgcggggataaaagggatttttcatgcaactttaagggagattgatttagcgcaattttggcggcagggatctaccgccagagaggtattacgcagagaaaaaggcgatgaggatcggcactaacaggctaagaataaaaccgtgaacaattgccgccgggaccatatccagcccgccagtacgttgaagaacgggcagggtgaaatccatacttgtggcaccgcataagcccagtgcagtagagcggctgcggcgaatcagcccagggatcaacataatagcaatcagttcacgggccagatcattaaaaaacgccgcgctcccgattaccggaccaaaagattcggtcaataaaataccggaaagagaataccagccgaaaccggaggccattgccagcgcggtattgatggggagatcaagaataaaggcgttaattaaaccaccaattaaactactgacaaccaccaccacggcgacaatcattccccggcgattaaggacaatctgctttaaggtcatgccattattgcgcaactgaataccaacgaggaaaagtagcaaaattaacgtgtattcactggcttcggtcgcgtgttgtaagaaagccagtccacttagaccaatggcaaaaccaatcactactacgccgcacagttttaggctctccagcgccatcgcaatacggctcgggagtttttcttgctgatggtggttgcgccacggcaggcctcgctccagccacatcagggcggcaatattacacagtaaaataacggtaatactgacggcagaataatgcagaatcgccaacaggttactggcgaggttatcgagaaacgccagactgatacccataaaaaagagaataaggtaaaccatccagcttaatagctgattaataacttttaacgcagcttgttggcgaagcggaatgaggtaacccacaatcaggggaaccagaatgattaacagcccagaaaacatgaaaacccagtccttgcaaagatgaagtcgaaatgcgcgatgacacactactgaaagcggaaggacgagtaaagttgcaattaaaaggaaatgttatgcataaggagcagtagagtattcgttttcatttaaagatattcttgcgctttaattacaaactgcaccgatgttggtggcgtcaaaatcgccgaggcgttccctgaaggccggggcagcccacatggatgtgggctgagggcgcgttttacagggatgttacctcgcgcccgacccggtagccgtaagggataagtcgagggcaccgcgcagcggcgattttgttcgccagagcccgggggtgcagggggcggcggcgattggccgccccctgcgcgctccttgcgccagtggcaatatgttgcttagctcatgaaaggagcgcaacaagatgatgaatcaacatataacaacatcttaaaaaaaggcctgacattacgccaggccttctgcgttaattaatcacgcttttccagcagggtccggtaaatcagaccaccgataatgccgccgacaattggcaccacccagaagaaccacagttgttctaatgcccagccgccctggaagatagcaaccgcggtgctgcgcgccgggttaacagaagtgttagtcaccggaatactaattaagtgaatcagggttaaggccagaccaatagcgatcggcgcaaaacctgccggcgcgaatttgtcggttgcgccgtggatcaccaacaggaaacctgcactcaataccagttcaactaccagcgcggaaagcatggaataaccgcctggactatgctcgccataaccgttagaagcaaaaccgctggctgccgcgtcaaaacccgttttaccactggcaattaaatacagcagcgccgctgcaacaataccgccgacaacctgggcaattacgtagccaacgacttcttttgccggaaaacgtccgccagcccataaaccaatagtgaccgccgggttaaaatgaccaccagaaatatgaccaacagcaaaggccatcgtcagaacggtcagaccgaacgccaacgccacgccggcaaaaccaatgcctaattccgggaagcctgcggccagtacagcactaccacagccaccaaaaacaagccagaaagtaccaaaacattcagctgctaattttctgaacatatccaccacaattaaaaattgaccctgtgaaaaatatggtcgttttatagggtcgtcgtaaaaaagtgacgacggaaataatgcgcggctattttaaaaacgaaggcgagtcattcaccagataaataaatccagtaaatttgatttagggcaacagcgggttgccccatatagtcatttgtctgattgacagtgtagtgcacgcaaaagatttaatcctttaggcgtaataaaaaataatttatcatgctaattatttgattttgttgtttttgcagacttatcagcaagagggagtataacgcgattattcgctcatttttcagacatttgccatgcttaaatgtgatgtcatcacgtattagcaaggcctttcccgttatactgccagcgtaaaggataagtcacatatttctggaggggatatgattcttgagcgcgttgaaattgtgggttttcgcggtatcaaccgtttgagcttgatgctggaacaaaacaacgtcctgattggggagaacgcgtggggtaaatccagcttgctggacgccttaactctgctgctaagcccagaaagtgatctctaccattttgagcgcgacgatttctggttcccgccgggagatatcaacgggcgagaacatcatctgcatattattttgaccttccgcgaaagcctgccaggccgacatcgggttcgccgttatcggccgctggaagcgtgctggacgccatgcaccgatggctatcaccgtattttttatcgtctggaaggggagagtgcggaagacggcagcgtgatgacactgcgcagttttctcgataaagacggacatccgattgatgtcgaggatattaacgatcaggcacgccatctggtgcgtttaatgccggtgctgcgcttgcgtgatgcccgttttatgcgccgtattcgtaacggcacggtgccaaatgtccctaatgtggaagtcaccgcgcgccagctcgatttcctcgcccgtgagttatccagtcatccgcaaaatctctctgatgggcagattcgtcagggactttccgcaatggtacagctgcttgagcattatttctctgagcagggggccggacaggcgcgatatcgtttaatgcggcggcgagccagcaatgagcaacgaagctggcgctatctggatatcatcaaccggatgattgaccgacctggtgggcgcagctatcgggttattttgctcggcctatttgctactttgttgcaggcaaaaggcacattgcgactggataaagacgcccgtccattgttgctgatcgaagatccagaaacccgtttacaccccattatgcttagtgttgcctggcatctgttgaatcttctgccattgcagcgcattgccaccaccaacagcggtgagttgcttagcttaacgccggtagagcatgtttgccgactggtacgtgagtccagccgcgttgccgcctggcgtctggggccgagtggcttgagtaccgaagatagccgacgcatatcctttcacattcgttttaaccgtccgagtagcctgtttgcacgctgctggttgctggtggaaggggaaacggaaacctgggttatcaatgaactggcgcgtcagtgcggacatcattttgatgccgaagggatcaaggtcattgagtttgcccagtccgggctaaagccactggttaaatttgcccgccgaatggggattgaatggcatgtactggtcgatggcgatgaagcagggaagaaatatgccgctacggtacgcagcctgttgaataacgatcgggaagccgaacgagaacatttaacggcgttaccggcgctggatatggaacattttatgtatcgccagggattttccgatgtgttccaccgcatggcgcaaatcccggaaaatgtaccgatgaatctacgcaaaattatcagcaaagcgatccatcgctcttccaaacccgatcttgccattgaagtggcaatggaggcaggacgtcgtggtgtggactccgtaccgacgctgctgaaaaaaatgttcagtcgcgtgctgtggctggcgcgcggtcgcgcggattaaccgcgaaacatcgtggccatttgtggctgaatagcgtcgagcatctcatagcgccgacggtattcagcccgttttttactggcgatttcggcaatctcttttcgtgctatctgtgctggaaggcggtaatggcgttcagcatcacatacgccgccaacgctttcccagaaagcgttgtaatcagcgtggatcttgccttctttatcgcgataacgcaggctgcggtaaatatgcgtttcattgctgacggcaataatctgctctacctgcaaacgttgggcaaacagacaggccgcttccatcacgaggcgtttgggaaatagcccgtggcaggctttcgtcgcattctggatttcctgatgtggaatttcccattttgcgccttgcagtccgccaataaacatcgttcttttcccctgatattcacacagggtaaacgtgatctctgccagaggaataccttcgctgttgcggaacaggattgtgctgtcaccttctttatccatactgatcatcatggtcagctcaagcgtgaactgctcgccgtttttgccttccagcttcgccagttgcagcccgggggtattcaaatataagctgaattcttccgcgctcatacattcgcggagtaacgcataatggtaacgtaacgcctccagcaattgcttacggctaagattcgccgcaaggtaagggcgatgcagacgcacaggcagtcgcggctggcgcgttaacaatacattgagattaggccagtgggaaagttcgttcatccactcaacgcttaaacgcggcataatcaagctgcgcagcaaaaatttctggcgaaaactacggcgatgccagaatttacccggccgacactgtccacgtgccagactaagaaaaagactcaggctgctgagagattcagatggcgtaaaggtccgttcagttagctggctcatattcatgaaatcaatggttatacatggcgtgcttttcaccattgcgtatcttaaccaaacatcaatagtgtgattactaacgtaaattttagggttttgttgatatttcgttgaagttaatgacccggattggcatatggagtattcagaaaatttatgaaaaagcggaaaaccgtgaagaagcgttacgttattgcgctggtgatagtcatcgccggactgattacgttatggagaattcttaacgcacccgtgccgacttatcagacgctgattgtgcgccccggtgatttacagcaaagcgtgctggcgaccggaaagctggacgcgctgcgtaaggttgatgtgggcgcgcaggtcagcggtcagttgaaaactctgagcgtggcgattggcgataaagtaaaaaaagaccagcttttaggggttattgatcctgaacaggctgaaaaccagattaaggaggtcgaagcaacgctgatggagctacgtgcgcagcggcagcaggcggaagcggagctgaaactggcgcgggtgacgtattcccgtcagcaacgtctggcacaaacgaaggctgttagtcagcaggatctcgacaccgccgcgacggagatggctgtgaaacaggcgcaaattggcaccattgacgcgcaaatcaagcgcaatcaggcttctctcgatacggctaaaaccaatctcgattacactcgcatcgttgccccgatggccggggaagtcacgcaaatcaccactctgcaaggccagacggtgattgccgcacaacaagcaccgaacattctgacgctggcagatatgagcgccatgctggtaaaagcgcaggtttctgaagcggatgtaatccacctgaagccggggcaaaaagcctggtttacggtgcttggcgatccactgacgcgctacgaggggcaaatcaaggatgtactaccgacgccggaaaaggttaacgacgctattttctattacgcccgttttgaagtccccaaccccaatggtttgctgcggctggatatgactgcgcaagtgcatattcagctcaccgatgtgaaaaatgtgctgacgatccctctgagcgcgttaggcgatccggttggcgataatcgttataaagtcaaattgttgcgtaatggtgaaacacgcgagcgtgaagtgacgattggcgcacgtaacgataccgatgttgagattgtcaaagggcttgaagcgggcgatgaagtggtgattggtgaggccaaaccaggagctgcacaatgacgcctttgctcgaattaaaggatattcgtcgcagctatcctgccggtgatgagcaggttgaggtgctgaagggcatcagcctcgatatttatgcgggtgagatggtcgcgattgttggcgctagcggttccggtaaaagcaccctgatgaatattctcggctgtctggataaggccaccagcggcacctatcgcgtcgccggtcaggatgttgccacgctggacgccgatgcgctggcgcaactgcgccgcgagcatttcggctttattttccagcgttaccatttgcttagccatttaaccgccgagcagaacgttgaagtacccgccgtctatgctggtcttgagcggaaacagcgactgcttcgtgcccaggagttgctgcaacggctggggctggaagaccgtacagagtattatccggcacagcttagcggtggtcagcaacagcgcgtcagcatcgcgcgggcattgatgaacggtggtcaggtaattcttgccgatgaaccaaccggcgcactggacagccattctggcgaagaggtgatggcgatcctgcatcagctgcgcgatcgtgggcatacggtgattatcgtcacccacgatccgcaggtcgctgctcaggccgagcgggtgatcgaaattcgcgacggcgaaattgtgcgcaatcctcccgccattgaaaaagtgaatgttactggcgggacggaacctgttgtcaacacggtgtctggctggcggcagtttgtcagcggttttaacgaggcgctgacgatggcatggcgggcgctggcagcgaataaaatgcgtactttactgaccatgctggggattattatcggtattgcgagcgtggtttccattgtcgtggtgggtgacgccgccaaacaaatggtgctggcggatattcgttctattggtacgaatactattgatgtctatcccgggaaagattttggcgatgacgatccgcaatatcagcaggcgctgaagtacgacgacttaatcgccatccaaaaacaaccgtgggtcgccagtgccacacctgccgtcagccaaaacctgcgcctgcgttataacaatgttgatgttgctgccagtgccaatggcgtgagcggcgattattttaatgtctatggcatgaccttcagtgaaggaaacacctttaatcaggagcagctgaacggtcgtgcgcaggtcgtggttctcgacagtaatactcgccgccagcttttcccccataaagcagatgtggttggcgaggtgattctggtcggcaatatgcccgccagagtcattggtgtggcggaagaaaaacagagcatgtttggtagcagtaaagtgctgcgtgtctggctaccttacagcacgatgtccgggcgagttatgggccagagctggcttaactccattactgtcagggtgaaagaaggatttgacagcgccgaggcggaacagcaactcacgcgtttacttagtctgcgccacggaaagaaggatttctttacctggaacatggacggcgtcttgaaaactgttgaaaagaccacacgtactttacaactgtttctgacgctggtggcggtgattagcctggtggtgggcggtattggtgtaatgaatattatgctggtgagtgtgaccgagcggacgcgggaaattggcattcgcatggctgtaggtgcgcgagcaagcgatgttttgcaacagttcctgatcgaagccgtactggtttgcctggtcggtggcgcgttgggaataacactgagtctgttaattgctttcaccttgcagcttttcttacccggctgggagattggttttagtccgttggcgctgctgctggcgtttctctgcagcacggtcaccgggattttatttggctggttacccgcacgaaatgcggcacgactggatccagtagatgctctggcacgagagtaatttttgagataaaaatgccagccgatcgggctggcattttgcctttaggatgtacacaatgagacagaagagttatgcgactgccgcttctacttcgacgggcacaataacactggcgtgattgccttttggcccctggtggacatcaaactgaacggattgtccagcttttagcgttctgtaaccatccatctgaatggtggaataatgagcgaaaatatcttcgccgccgccttcagggcagatgaaaccaaaccctttggcattgttgaaccacttaacagtacccttttccatgcttcgacatccttcgcaaatcttatacaagtaagatggaataaaccggggtcagagagggggctgttcaaaacctcgccaactctagaaatacaatttagagaattagggcgagccgtcaagcatttgacaggggacaaggggcaggtatgaatcaaaaatttgaagcagttaacgctattgacaggaatgtgacagatgtcgctgatgccaacgatagatgatagttatctatcatgtggagtagattggtcaggcaaataagctcttgtcagcggcagggcgttctgccgataaccgtaaccgaagatgataactgacaatgggtaaaacgaacgactggctggactttgatcaactggcggaagaaaaagttcgcgacgcgctaaaaccgccatctatgtataaagtgatattagtcaatgatgattacactccgatggagtttgttattgacgtgttacaaaaattcttttcttatgatgtagaacgtgcaacgcaattgatgctcgctgttcactaccaggggaaggccatttgcggagtctttaccgccgaggttgcagaaaccaaagtggcgatggtgaacaagtacgcgagggagaatgagcatccattgctgtgtacgctagaaaaagcctgaatgcaggcataaaaattgggggaggtgcctatgctcaatcaagaactggaactcagtttaaatatggctttcgccagagcgcgcgagcaccgtcatgagtttatgaccgtcgagcacttgttactggcgctgctcagtaacccatctgcccgggaggcgctggaagcgtgttctgtggatttggttgcgctccgtcaggaactggaagcctttattgaacaaaccacacccgttctgcctgccagtgaagaggagcgcgacacacagccgacgctgagttttcagcgtgtactgcaacgtgcggtcttccatgtccagtcctccggtcgcaatgaggttaccggtgcaaacgttctggtcgctatctttagcgaacaggagagccaggcggcatatctgttgcgtaaacatgaagtcagccgtctcgatgtggtgaactttatctctcatggcacgcgtaaagacgagccgacacagtcttctgatcctggcagccagccaaacagcgaagaacaagctggtggggaggaacgtatggagaatttcacgacgaacctgaatcagcttgcgcgcgtgggcggaatcgacccactgattggtcgtgagaaggagctggagcgtgctattcaggttctctgccgtcgccgtaaaaacaacccgctgctggtgggggaatctggtgtcggtaaaaccgcgattgcggaaggtcttgcctggcgaattgttcagggcgatgtgccggaagtgatggctgactgtacgatttactctctcgatatcggttctctgttagcgggcacaaaatatcgcggcgactttgaaaaacgttttaaagcgttgctcaagcagctggagcaggacactaacagcatcctgtttattgatgagatccacaccattatcggtgcgggtgcagcgtctggtggtcaggtcgatgcggctaacctaatcaaaccgttgctctccagcggtaaaattcgtgtaattggtagcacaacctatcaggagttcagcaacattttcgagaaagaccgtgctctggcgcgtcgcttccagaaaattgatattactgaaccgagcatcgaagaaactgttcaaatcatcaatggcctgaaaccgaagtatgaagcgcaccacgacgtgcgttataccgcaaaagcggtgcgtgcggcggtagagctggcggtgaaatacattaacgatcgtcatctgccggataaagccattgatgttatcgacgaagcgggcgctcgcgcacgcctgatgccggtaagcaaacgcaagaaaaccgttaatgtggcggatattgagtccgtggtggcccgtattgcacgcattccagagaagagtgtttctcagagtgatcgtgataccctgaaaaacctcggcgatcgcttgaaaatgctggtcttcggtcaggataaagccattgaggcgctgactgaagccattaagatggcgcgtgcaggtttaggtcacgaacataaaccggttggtagcttcctgtttgccggccctaccggggtcgggaaaacagaggtgacggtacagcttagcaaagctttgggcattgagcttctgcgctttgatatgtccgagtatatggaacgccataccgtcagccgtcttattggtgcgcctccgggatacgttggttttgatcagggcggtttgctgactgatgcggtcatcaagcatccacatgcggtgctgctgctggacgaaatcgagaaagcgcacccggacgtgttcaatattctgttgcaggtgatggataacggtacgctgaccgataacaacggacgcaaagcagacttccgtaacgtggtgctggtgatgaccaccaacgccggggtacgggaaactgagcgcaaatccattggtcttatccaccaggataacagcaccgatgcgatggaagagatcaagaagatctttacaccggaattccgtaaccgtctcgacaacattatctggtttgatcatctgagtaccgacgtgatccatcaggtggtggataaattcatcgtcgagttgcaggttcagctggatcagaaaggtgtttctctggaagtgagccaggaagcgcgtaactggctggccgagaaaggttacgaccgggcaatgggcgctcgtccgatggcgcgtgtcatccaggacaacctgaaaaaaccgctcgccaacgaactgctgtttggtagcctggtggacggcggtcaggtcaccgtcgcgctggataaagagaaaaatgagctgacttacggattccagagtgcacaaaagcacaaggcggaagcagcgcattaatctgattgttaggtaggttggtcaagtccgtaatctcgaaagaggttacggactttttgtttatggggtggaggaggttcagaccctttttttaatgatgatggtaagttgttgataattagtgctgcgggaaggtaaggataaaaaagggtgctgcaggagaatgggatggttttgctttattaacaacgggctaaacgtgtagtatttgagttcactgccgtacaggcagcttagaaattcacaggtaacatactccacccgcccaccatgttcactgccgtacagacagataaaatgcgaaaaaaaagctcgcactttcgtacgagctcttctttaaatatggcggtgagggggggattcgaacccccgatacgttgccgtatacacactttccaggcgtgctccttcagccactcggacacctcaccaaattgttttgctaccaaacctcatgggtggcaacggggcgctactatagggagttggagtaaaacggtcaagaagaattttaatgataattattgtttgctcatactgtaaacaagttgtgcagtatatctacatcgagacaagttacggacttatacttccaaagtacttcatacatatcacaaaataaaaaggccggttaaaccgaccttttactcgttctttctcttcgcccatcaggcggtaaaacaatcagcgactacggaagacaatgcggcctttgctcaggtcgtacggggtcagttcaacagtcactttgtcgcccgtcaggatgcggatgtagtttttgcgcattttaccggagatgtgtgcagtaaccacgtgaccgttttctaactctacgcggaacatggtattaggcaacgtttcaagaacggtaccttgcatttcaatattgtcttctttggccatctaatcctctggggtatcactaccgtaatttgaaccggcaagataatgccgaagttctgtaaataagtaaagatttgcgcgctaaatcgcaacaaacaggttcggcacattactccgaaaacacacggctaagccgcaccaaaagcgcaacgtataagggagcggtgagataaacgatgggcgttacctgacgcgaaaaattccttatcggcagcggggtaatgagcgtaaccaactctgcgaccgcaattataacactctggggagaaatgtgccgaaaacattcattcttgtggactaaacaagcatcgtggtacccagaaattattcggcaatcgtccgaggcgcatttgattgagataattaaggtaatcccggcggggaatttcgcaggcaccaaggcttgctgtgtgatcgttaaggacctggcagtcgataagcttaccgccatgaccgataaattcctcacagaataccagaagcgccgttttagacgcattttccatccggctgaacatggactcgccacaaaatagcgttccctgggccacgccgtacataccgccgacaagctcatcttcacgccagacttcaatggagtgggcatggccgagttcgtgaaggcgatggtaggcttcgaccacgccacgcgtgatccaggttccttcttcgcgatcgctggcacagccttcaatgacctgaccaaaagcgtaattcatcgtgacacgataggggctgcgtttatgaaatcgcttcatactacggctgatatgcagactttctggccatagcaccgcgcggggatcggggctccaccagaggatggggtcgcctggagaaaaccacggaaaaataccacgctggtaagccattaacaggcgcgcagggctaagatcgcccccaagtgccagcaggccgttaggctcacgtaatgcgccttccggggaagggaaggctatactatggcgagaaagctgaaccaggcgcatgaccgcaaaactccacgcaagtcggatcgttcaataatagcttacaaaccctgcttgaactggtaataacgcccctgtctggcaagcagttctgcgtgagtaccttgctcaataatttgcccgttgtccatcactattatttgttggaaacgagagagtccgcgaagtcgatgggtgaccattaacaccgttttctcacgcatcatttctgcaagcaattcaaggatctggctttcggttgtggcatctaagccttcggtaggttcatccagcaacaccagtggcgcatcatgtaacagcgcacgggcgatagccagacggcgcagttcaccaccggagagctggcgtccgccttcacctaaccaactgttgagacctgcatcctcgagcagcttttccaggccaacgcgacgcaagatctcgctcagagcctcatcactactgccagggctggcgagtaaaagattatcacgcagcgtggcgctaaacagatgcactcgctgaggaacaacgctgatggtctgtcgtagagccgcttcattcaggctggctatggggctatcgttaagcaaaatctcgccctgttgcgggtcccatgcgcgggtcagctgttgtaacagtgtacttttgccgcatccggttcgcccgagaatcgctatatgttccccggcgtttacctgaagagaaatccctttaagtgcctgttgagattgctccggataagtgaactgaacatcccgtaacgtcaggctaacgcgatcggcaacacgagtttgggtatcaggaaaggtgacctccggtttttgatccgttaagtcagagatacgtacggcagaggcaatgacttgccccagatgctgaaatgcacccgttactggtgccagtgcttcaaacgcggctaacgcgcagaagacaaacagggcaattaacgcgccgggttgagcattgccgccaacgccgccagacgccatccacagcatcaggatcaccgctaacgcgccaatgagcagcattatcgcttggctcaatgcggtcagttcagattgacggcgttgcgcttccagccattgaatttctgtattctctagttgcgtgcgataacgatcgctggcaccaaaaatggtcagctcagcttgcccttgcagccaggccgtcagttgttggcgatactgtccgcgaagatgagtcagattttgcccggtgctttttcccgcacgataaaacagcggtggcatcaggaaaagcgtcagtaacataatgccgcccagcgtaaaggcgagggtgaaatcaaggaaacttaacccgattgtcaccaccataatcaccacaaaagcgcccaccagcgggctgataacgcgcaggtaaagatgatcgagcgtatcaacatccgccaccacgcgattgagcaattcgccctgacgatagcgcgccagtccggcaggggagaggggcagcaatttgctgaaggtgtaaatgcgcagatgctgcaacacgcggaaagtcgcgtcgtgacttaccagacgttcaaaatagcgcccggcagtacgggtgattgctgcgccacgcacgcccgcagcgggtagcatatagttgaagctgtacagtccggcaacccccgcaaccgcactggcgctgaggaaccagccggaaagtgtcaacagaccgatactggcgagcagcgtcacaattgccagcacaataccaagacttaacatccatttatgacgtttatacagtgccagatagggtagcaaagcgcgcatttaaatctcctcctgacgatgggccagtaatgtggcgaatgggccaccagccacacttaattccgcgtaacgtccttgctcaataatccggccatcctgcataacccaaatgacatcccagtcagcaagatcttctaactggtgggtgaccattaacgttgtctggcgcagagaggcggcattcagcgcctccattacgcgctgttcactgtgagcatcaaggctggcagcgggttcatccaacagtaataggctacagggatttagtaacgcacgggccaccgccacgcgctgcgcctgccccacggaaaggcgggcagcctggtcgccaacaggcgtatcaacgccttgtgggaggagcggtagaaactcgctgacccaggcgttatccagcgctgcttgtaattcttgttcgctggcatcaggtcgcgccagtagtacgttatcccgcaatgttgctgccggtaattgtgggttttgcccaacccaggagagatgtttacgccaactttctggacttaaatcgcgtaattctatcccgttgattcgtaggcttccctgataactgagaaaaccagaaagcgcgttcagcagactgcttttaccactaccgctgcgaccaaccaacaccgcacgttggcctgctggcaaagtaaagttcagcggtccggccagcgttttaccttccgggctcgtgataaacagctcctcggcctcaatggtcaccggatcggtgcttgctaattccgcctcaccacgttgcggatgggcgagcggggtttccataaacgttttcagactgtcagctgcgccaacagcctgggctttagcatgataaaacgtaccgagatcgcgtaatggctggaaaaactctggcgcaaggatcagggccagaaaacccgcagccagcgtcacaccggtatcgtagtgaccaaaatccagctcgccgagataggaaaaaccaaagtagaccgccaccagagcaatactcaggctggtaaaaaattcgagaatgccggaggataaaaacgccagccgtagcacttccattgtccgttggcggaaatcttcgctagcagaacgaatactttcaatttcagcttcaccacgaccaaaaatacgcaatgtttccatgccgcgcaggcgatcgaggaaatgcccacttaagcgagcaagagcgagaaagttacgtcggttagcatcggcagcccccattccaaccagcgccataaacaacggaattaacggtgcagtgcccagcagaatgagcgccgcagcccagttagaggggaagattgccaccacaatcagcaacggcacgctcactgccagcgccatttgcggcagatagcgtgcatagtaatcatgcatatcgtcaatttgctcgagtaccagcgtcgcccagctccccgcaggtttaccctgaatccacgctggccctgcttgttgcagacggtcgagaacctgacggcggatggcaaagcggatatgctgcccggcgtgataacccacccgttcgcgtaaccagaccacccatgcgcgcagtacaaaggtcagaaccagtaacgtaaagggaagcagcagggcttcacggggaatattctccataatcatatgttgcagaattcgcgccatgaaccaggcctgggcaatgatcaatatgccgctcacaaagcccagcagacgagaaatattcagccaacgttgggagatgacgctttgctgttttaaccagcgggttaactctttttgacgagatttattcattgcacgcttagcaggtgagttatcagaattatttgcagagcaatgttacaacggggaaaaaataaaggcgacccatagtcgcatggtgtcgccttctttacttttgttactgatttgtaaaattattttgcgtcagctaaaccatcgaggtagcgttccgcatcaagtgctgccatgcagcctgtaccggcgctagtaatggcctggcgataaatgtgatccatcacgtcgcctgcggcaaagacgccaggaatgctggtctgggtggcattaccatgaataccgctctgtactttgatgtagccgttttccagttccagctgcccttcgaaaatcgcagtattcgggctgtgaccgatagcaacaaacagaccggcaacgtcgagactctcgatgttatcgctgttttgcgtatcgcgcagacgaacgccagtgacacccatttgatcgccggtcacttcttccagcgtacggttggtgtgcagaatgatgttgccgttctccactttatccatcaggcgcttaatgaggattttttccgcgcggaaaccgtcacggcggtgaatcagatgcacttcgctagcgatgttagacagatacagcgcctcttcaaccgcggtattgccgccgccgatgaccgcaactttctggttgcgatagaagaaaccgtcgcaggttgcacaagcagaaaccccacggcctttaaaggcttcttcagagggcaggccgagatagcgtgcagaagctccggtggcaataatcagcgcgtcgcaagtgtattcgccgttatcgccattcagacggaacggacggttttgcagatccaccttgttgatatgatcaaaaatgatctcagtttcaaacttggtggcatgttcgtgcatgcgctccattaataacggaccggtcagatcgtttggatcgccaggccagttttccacttccgtggtggtggtcagttggccgcctttttccatgccggtaatcagcacaggttgcaggttggcgcgcgccgcgtagacagcagcggtgtatcccgccgggccactacccaggataagcagtttactgtgtttggtcgtgcccatgagatccccatagttgttggcagacaatgggcaggattgtagggaatttacagacgtaaaaaaagagtatgacgattttgttaacaatttgtgcaatcggcagcatcgataagcaggtcaaattctcccgtcattatcacctctgctacttaaatttcccgctttataagccgattaaatgatgaataaacgcccctgttaatgaatatctggcatgttgtactaaaaatcgatgttttgctttgacaatcccctggtgttttgcgaaaacattcgaggaagaaaaaaaacagtattcttatatgcgcataaccatgcatgtaaataccatgtttaccgtgctagtgaaatctacgtatggcgtggacagacgccattcgtgatgtcgatagctgccacaaggcaacggtcttctcaccgtagacccaggcattgcgcgccgtgaatcttcatgatttcggtctatcgtgacgggtagcgactctgaacagtgatgtttcagggtcagacaggagtagggaaggaatacagagagacaataataatggtagatagcaagaagcgccctggcaaagatctcgaccgtatcgatcgtaacattcttaatgagttgcaaaaggatgggcgtatttctaacgtcgagctttctaaacgtgtgggactttccccaacgccgtgccttgagcgtgtgcgtcggctggaaagacaagggtttattcagggctatacggcgctgcttaacccccattatctggatgcaagtcttctggtattcgttgagattactctgaatcgtggcgcaccggatgtgtttgaacaattcaataccgctgtacaaaaacttgaagaaattcaggagtgtcatttagtatccggtgatttcgactacctgttgaaaacacgcgtgccggatatgagtgcctaccgtaagttgctgggggaaaccctgctgcgtctgcctggcgtcaatgacacacggacatacgttgttatggaagaagtcaagcagagtaatcgtctggttattaagacgcgctaacacggaacaggtgcaaaatcggcgtattttgattacactcctgttaatccatacagcaacagtactggggtaacctggtactgttgtccgttttagcatcgggcaggaaaagcctgtaacctggagagcctttcttgagccaggaatacattgaagacaaagaagtcacattgacaaagttaagtagcggccgccgccttctggaggcgttgctgatccttattgtcctgtttgccgtctggttgatggctgccttactaagctttaaccctagcgaccccagctggagccaaacggcctggcatgaacctatccataatttaggtgggatgcccggtgcgtggttggcagatacgctgttctttatttttggcgtgatggcttacaccattcccgtcattattgtcggcggttgttggtttgcctggcgtcatcagtccagcgacgaatacattgattattttgccgttagcctacgcatcattggcgttttggcgctcatccttacctcctgtggtctggcggcaatcaacgctgacgatatctggtattttgcctccggtggcgtcattggcagcttactaagcactacgctacaaccactgctacacagtagcgggggaactattgcgctgctctgcgtttgggcagcgggcctgacgttgttcaccggttggagttgggtgaccattgctgaaaaactcggcggctggattttaaacattctcaccttcgccagtaatcgtacccgtcgcgatgatacctgggtcgatgaagatgagtatgaagacgacgaagagtatgaagatgaaaatcacggcaaacagcatgaaagtcgccgtgcccgtattcttcgcggcgcgctagcgcgtcgtaaacggttggcggaaaaattcattaatccgatggggcggcaaacagacgctgcgttgttctccggtaagcggatggatgatgacgaagagattacctacactgcacgcggtgtggctgccgacccggacgacgtcctatttagcggcaatcgtgcaacgcagccagaatatgacgaatacgatccattattaaacggtgcgccaattaccgaacctgtcgctgtagcagctgctgctaccacggcgacacaaagctgggctgcgccggttgaacctgtgactcagacgccgcctgttgcctctgttgatgttccacctgcgcaacctacagtagcctggcagcctgtaccgggtccacaaacgggagagccggttattgctcctgcaccggaaggttacccacagcagagtcaatatgcgcagcctgcagtgcaatataatgagccgctgcaacaaccagtacagccgcagcagccgtattatgcacctgcagctgaacaacctgcgcaacagccgtattatgcccctgcgccagaacaaccggtggcaggtaacgcctggcaagccgaagagcagcaatccacttttgctccacagtctacataccagactgagcaaacttatcagcagccagccgctcaggagccgttgtaccaacagccgcaacccgttgaacagcagcctgttgtggagcctgaacccgttgtagaagagacaaaacccgcgcgtccgccgctttactactttgaagaagttgaagagaagcgagcccgtgaacgtgaacaacttgcggcctggtatcaaccgattccagaaccggttaaagaaccagaaccgatcaaatctagcctgaaagcaccttctgttgcagcagtacctccagtagaagccgctgccgctgtttccccgctggcatctggcgtgaaaaaagcgacactggcgacgggggctgccgcaaccgttgccgcgccagtcttcagtctggcaaatagcggtggaccgcgtcctcaggtcaaagaggggattggtccgcagttgccacgaccgaaacgtatccgcgtgccaactcgtcgtgaactggcgtcttacggtattaagctgcccagtcagcgtgcggcggaagaaaaagcccgtgaagcccagcgcaatcagtacgattctggcgatcagtacaacgatgatgaaatcgatgcgatgcagcaggatgaactggcacgtcagttcgcccagacacagcagcaacgctatggcgaacagtatcaacatgatgtgcccgtaaacgcagaagatgcagatgctgcggcagaggctgaactggctcgtcagtttgcgcaaactcaacaacaacgttattccggcgaacaaccggctggggcgaatccgttcagcctggatgattttgaatttagcccaatgaaagcgttgctggatgatggtccacacgaaccgttgtttacgccaattgttgaacctgtacagcagccgcaacaaccggttgcaccgcagcagcaatatcagcagccgcaacaaccagttccgccgcagccgcagtatcagcagccacaacagccggttgcgccgcagccacaatatcagcagccgcaacaaccggttgcgccacagcagcaatatcagcagccgcaacaaccggttgcgccgcagcagcagtatcagcagccacaacagccagttgcgccacaaccgcaggataccctgcttcatccgctgttgatgcgtaatggcgacagccgtccgttgcataaaccgacgacgccgctgccttctctggatttgctgacaccgccgccgagcgaagtggagccggtagatacctttgcgcttgaacaaatggctcgcctggtggaagcgcgtctggctgatttccgtattaaagccgatgtcgtcaattactctccggggccggttatcactcgctttgaattgaacctggcaccgggcgtaaaagcggcgcgcatttctaacttgagtcgggaccttgcccgtagtcttagcacggtggcggtgcgtgtcgttgaagttattcctggcaaaccctatgtaggtctggagttaccgaataaaaaacgacaaaccgtttatctgcgcgaagttttggataacgccaaattccgcgataatccgagcccattaaccgtggtgctgggtaaagatatcgccggtgagccggtggttgccgatctggcgaaaatgccgcacttgttggttgcggggactaccggttccggtaaatctgtcggtgtgaacgcgatgatcctgagcatgctttataaagcacagccagaagatgtgcgtttcatcatgatcgacccgaaaatgctggagcttagcgtttatgaaggcattccgcatctgttaacggaagtcgttactgatatgaaagatgccgccaacgcgctgcgctggtgtgttaacgagatggagcgtcggtataaactgatgtctgcgctgggtgtgcgtaatctggcgggttataacgaaaaaattgctgaagccgatcgcatgatgcgtccgattccagacccgtactggaagccgggtgacagtatggatgcccagcatccggtgctgaaaaaagaaccatacattgtggtgttggttgacgaatttgccgacctgatgatgacggtaggtaaaaaagtggaagagctgatagcacgtctggcgcaaaaagcccgtgccgcgggtatccacctcgtactggcaactcagcgtccaagcgttgatgttattactggtctgattaaagcgaatattccgacccgtatcgcctttaccgtatccagtaagattgacagtcgtaccattcttgatcaggctggcgcggaaagtctgctgggtatgggggatatgctctactctgggccgaactccacgttgccggtacgtgtccatggtgcttttgttcgcgatcaggaagttcatgccgtggtgcaggactggaaagcgcgtggtcgcccacagtatgttgatggcatcacctccgacagcgaaagcgaaggtggtgcgggtggtttcgatggcgctgaagaactggatccgttgttcgatcaggcggtgcagtttgtcactgaaaaacgcaaagcgagtatttctggcgtacagcgtcagttccgcattggttataaccgtgcagcgcgtattatcgaacagatggaagcgcaggggattgtcagcgaacaggggcacaacggtaatcgtgaagtgctggccccaccgccgtttgactaactaatgcatcgtatgccggataaggcgcggtagcgtcgcatccggcactctatcaactgaaaattcagtattttcttctttcctcaagctgattattagcctggaatagagagtagagggaactcccgatcgggagtgacgtaatttgaggaataatgatgaaaaaaattgccatcacctgtgcattactcagtagcttagtagcaagcagcgtttgggctgatgccgcaagcgatctgaaaagccgcctggataaagtcagcagcttccacgccagcttcacacaaaaagtgactgacggtagcggcgcggcggtgcaggaaggtcagggcgatctgtgggtgaaacgtccaaacttattcaactggcatatgacacaacctgatgaaagcattctggtttctgacggtaaaacactgtggttctataacccgttcgttgagcaagctacggcaacctggctgaaagatgccaccggtaatacgccgtttatgctgattgcccgcaaccagtccagcgactggcagcagtacaatatcaaacagaatggcgatgactttgtcctgacgccgaaagccagcaatggcaatctgaagcagttcaccattaacgtgggacgtgatggcacaatccatcagtttagcgcggtggagcaggacgatcagcgcagcagttatcaactgaaatcccagcaaaatggggctgtggatgcagcgaaatttaccttcaccccgccgcaaggcgtcacggtagatgatcaacgtaagtaaaggcacctgagtgagcaatctgagcctcgattttagcgataatacttttcaacctctggccgcgcgtatgcggccagaaaatttagcacagtatatcggccagcaacatttgctggctgcggggaagccgttgccgcgcgctatcgaagccgggcatttacattctatgatcctctgggggccgccgggtaccggcaaaacaactctcgctgaagtgattgcccgctatgcgaacgctgatgtggaacgtatttctgccgtcacctctggcgtgaaagagattcgcgaggcgatcgagcgcgcccggcaaaaccgcaatgcaggtcgccgcactattctttttgttgacgaagttcaccgtttcaacaaaagccagcaggatgcatttctgccacatattgaagacggcaccatcacttttattggcgcaaccactgaaaacccgagctttgagcttaatagcgcactgctttcccgtgcccgtgtctatctgttgaaatccctgagtacagaggatattgagcaagtactaactcaggcgatggaagacaaaacccgtggctatggtggtcaggatattgttctgccagatgaaacacgacgcgccattgctgaactggtgaatggcgacgcgcgccgggcgttaaatacgctggaaatgatggcggatatggccgaagtcgatgatagcggtaagcgggtcctgaagcctgaattactgaccgaaatcgccggtgaacgtagcgcccgctttgataacaaaggcgatcgcttttacgatctgatttccgcactgcataagagcgtacgtggtagcgcacccgatgcggcgctgtactggtatgcgcgaattattaccgctggtggcgatccgttatatgtcgcgcgtcgctgtctggcgattgcgtctgaagacgtcggtaatgccgatccacgggcgatgcaggtggcaattgcggcctgggattgctttactcgcgttggcccggcggaaggtgaacgcgccattgctcaggcgattgtttacctggcctgcgcgccaaaaagcaacgctgtctacactgcgtttaaagccgcgctggccgatgctcgcgaacgcccggattatgacgtgccggttcatttgcgtaatgcgccgacgaaattaatgaaggaaatgggctacgggcaggaatatcgttacgctcatgatgaagcaaacgcttatgctgccggtgaggtttacttcccgccggaaatagcacaaacacgctattatttcccgacaaacaggggccttgaaggcaagattggcgaaaagctcgcctggctggctgaacaggatcaaaatagccccataaaacgctaccgttaatgttatcgttgcggtaatgttgttactgtatccctgtggtcgcaggctgtggccacatctcccatttaattcgataagcacaggataagcatgctcgatcccaatctgctgcgtaatgagccagacgcagtcgctgaaaaactggcacgccggggctttaagctggatgtagataagctgggcgctcttgaagagcgtcgtaaagtattgcaggtcaaaacggaaaacctgcaagcggagcgtaactcccgaagcaaatccattggccaggcgaaagcgcgcggggaagatatcgagcctttacgtctggaagtgaacaaactgggcgaagagctggatgcagcaaaagccgagctggatgctttacaggctgaaattcgcgatatcgcgctgaccatccctaacctgcctgcagatgaagtgccggtaggtaaagacgaaaatgacaacgttgaagtcagccgctggggtaccccgcgtgagtttgactttgaagttcgtgaccacgtgacgctgggtgaaatgcactctggcctcgactttgcagctgcagttaagctgactggttcccgctttgtggtaatgaaagggcagattgctcgcatgcaccgcgcactgagccagtttatgctggatctgcataccgaacagcatggctacagtgagaactatgttccgtacctggttaaccaggacacgctgtacggtacgggtcaactgccgaaatttgctggcgatctgttccatactcgtccgctggaagaagaagcagacaccagtaactatgcgctgatcccaacggcagaagttccgctgactaacctggtgcgcggtgaaatcatcgatgaagatgatctgccaattaagatgaccgcccacaccccatgcttccgttctgaagccggtagttatggtcgtgacacccgtggtctgatccgtatgcaccagttcgacaaagttgaaatggtgcagatcgtgcgcccagaagacagtatggcggcgctggaagagatgactggtcatgcagaaaaagtcctgcagttgctgggcctgccgtaccgtaaaatcatcctttgcactggcgacatgggctttggcgcttgcaaaacttacgacctggaagtatggatcccggcacagaacacctaccgtgagatctcttcctgctccaacgtttgggatttccaggcacgtcgtatgcaggcacgttgccgcagcaagagcgacaagaaaacccgtctggttcataccctgaacggttctggtctggctgttggtcgtacgctggttgcagtaatggaaaactatcagcaggctgatggtcgtattgaagtaccagaagttctgcgtccgtatatgaacggactggaatatattggctaatacccaatttttctgaatctaaaaagcgcctgcgggcgctttttttgtctccctttgataccgaacaataattactcctcacttacacgtaatactactttcgagtgaaaatctacctatctctttgattttcaaattattcgatgtatacaagcctatatagcgaactgctatagaaataattacacaatacggtttgttactggaatcaatcgtgagcaagcttgagtgagccattatgaaaacgaaaatccctgatgcggtattggctgctgaggtgagtcgccgtggtttggtaaaaacgacagcgatcggcggcctggcaatggccagcagcgcattaacattaccttttagtcggattgcgcacgctgtcgatagcgccattccaacaaaaagtgacgaaaaggttatctggagcgcctgtacagttaactgtggtagtcgctgcccgctacgtatgcacgtcgtggacggtgaaatcaaatatgtcgaaacggacaataccggcgatgacaattacgacggcctgcaccaggttcgcgcctgcctgcgtgggcgttccatgcgtcgccgtgtctacaatccggaccgcctgaaatatccgatgaaacgagtcggggcgcgcggtgaaggcaaattcgagcgcattagctgggaagaagcctacgacatcatcgcgaccaatatgcagcgcctgatcaaagagtacggcaacgagtctatctatctgaactatggcaccggtacgctgggcggcaccatgacccgctcctggccgccgggaaataccctggtcgcgcggctgatgaactgctgcggcggctatctgaaccattacggcgactactcctccgcgcaaattgcggaaggtttgaactatacctacggcggctgggcagatggcaacagcccgagcgatatcgaaaacagtaagctggtagtgctgtttggtaataaccctggcgaaacgcgaatgagtggcggtggggtgacttactatcttgaacaggcacgccagaaatctaatgcccgcatgatcatcatcgatccgcgctataccgacaccggtgccgggcgcgaagatgagtggatccctattcgtccgggaacagatgccgcactggttaacggtctggcgtacgtcatgatcactgaaaacctggtggatcaggcattcctcgataaatattgcgttggctacgatgagaaaaccctgccagccagtgcgccgaaaaatggccactataaagcttatattctgggtgaagggccagatggcgtggctaaaacgccggaatgggccagccaaatcactggtgttccggcagacaaaatcatcaaattggctcgtgaaatcggtagtaccaaaccggcgtttatcagccagggatggggcccgcagcgtcacgctaacggtgaaatcgcaacccgtgctatcagcatgctggcgattctgaccggtaacgttggtattaacggaggcaacagcggcgcgcgtgaaggtagttacagcttaccgtttgtccgtatgccgaccttggaaaacccgatccagaccagcattagcatgtttatgtggaccgatgccattgaacgtggcccggaaatgacggcgctgcgtgatggtgtacgcgggaaagataagctggatgtgccgatcaaaatgatctggaactatgccggtaactgcctgattaaccagcattctgaaatcaaccgtacccatgaaatccttcaggatgataagaagtgcgagctgattgtggttatcgactgccacatgaccagtagcgcgaaatatgctgacatcctgctgcctgactgcaccgcttccgaacagatggactttgcgctggatgcatcctgcgggaatatgtcttacgtgattttcaacgatcaggtgattaaaccgcgctttgaatgtaagaccatctatgaaatgaccagcgaactggcaaaacgtcttggcgttgagcaacagtttactgaaggccgtacccaggaagagtggatgcggcatctgtatgcccagagccgggaagcgattcctgaactgccaacgtttgaagagttccgcaagcaggggatctttaaaaagcgcgacccacaagggcatcacgttgcttataaagccttccgtgaagatccgcaggcaaacccactgactacgccaagcggcaaaattgagatttatagccaggcgctggctgacattgccgctacctgggaattgcctgaaggcgatgtgatcgatccactgccgatctacacgccgggctttgaaagttatcaggatccgctgaacaaacagtatccgctgcagcttacaggtttccactataaatctcgcgttcacagtacttacggcaacgttgatgtgctgaaagcggcttgccgtcaggaaatgtggatcaacccgcttgatgcccaaaaacgcggtatccacaacggcgataaagtcaggatctttaacgatcgtggtgaggttcatattgaggcgaaagtgacgccacgaatgatgccgggtgtggtcgcactgggtgaaggtgcctggtatgacccggatgcaaaacgtgtcgataagggtggttgtattaacgtactgaccactcaacgtccgtctcctctcgctaaggggaatccgagtcatacaaaccttgttcaggttgaaaaggtgtaaggagtaaccgatgacaacccagtatggattttttattgattccagccgttgcaccggttgcaaaacctgcgagctggcctgtaaagactacaaagatttgacgccagaagtcagcttccgccgcatttatgaatatgctggcggcgactggcaggaagataacggtgtctggcaccagaacgtgtttgcctactatctgagcattagttgtaaccactgcgaagatccggcttgtactaaagtctgcccgagcggtgcgatgcataaacgtgaagatggttttgttgtggtcgatgaagatgtgtgcattggctgccgctactgccatatggcttgcccgtatggcgcaccgcaatataacgaaacgaaaggccatatgaccaaatgcgatggttgttatgaccgtgttgcggagggtaaaaagccgatctgtgttgaatcttgtccgctgcgggcgctggatttcggccctatcgacgagctgcgtaaaaaacatggcgatctggcggccgttgcgccgttgccgcgagctcactttaccaaaccgaatattgtgatcaaacccaatgccaatagccgcccgaccggggataccactggctatctggcaaacccgaaggaggtgtgagatgggaagtggatggcatgaatggccgctgatgatcttcacggtcttcgggcaatgtgtagcaggtggttttatcgttctggctttggcgctgctcaaaggcgacctgcgagcagaagcccagcagcgtgttatcgcctgcatgtttggtttatgggtgctgatgggcattggctttatcgcctctatgctccatcttggtagtccaatgcgcgcttttaacagcctcaaccgggtaggggctagtgcactcagtaacgaaatcgccagcggtagcatcttttttgccgtaggcggcatcggctggttgctggcaatgctgaaaaagctgagtccggcattgcgtacgctgtggctgatagtgacgatggttcttggcgtcatctttgtctggatgatggtgcgtgtgtataacagcattgataccgttccgacctggtacagcatctggacgccgatgggcttcttcctgacgatgtttatgggcggcccgttactgggttacctgttgttgagtctggctggcgtcgatggctgggcgatgcgtctgctgccagcaatttctgtactggcactggtagtgagtggcgtggtgagtgtgatgcagggcgcagagctggcgactattcatagttctgtgcagcaggccgcagcgctggtgccggactatggtgcgctgatgtcctggcggatcgtgcttttggccgttgccctgtgcttgtggattgcaccacagctaaaaggttatcagcctgcggttccgctactttctgtaagtttcattctgcttctggcaggggaattaatcggtcgcggcgtattctatggtttgcatatgaccgtggggatggccgtcgcaagctaatcataacaaccggggtttcggccccggttctcttttatttctgcttcgttaacgtgtcataactggtcatcaaattacgataatcaggaatgtggttagagaacaacgtcgccagtccttcaatatcattacgccagtcgcgatgcagctcgcacgccacgccgaaccatgtcatcaattgcgcaccagcttggctcaagcgatcccatgcgctatgccgggtaatttcattaaaggtcccactcgcgtcagtcacgacaaagacgtcaaacccttcttcaatggcactaagcgccgggaatgccacgcaaacttcggttaccacaccggcaataattaactgttttttacctgtcgctttgacagcttttacaaaatcttcgttatcccaggcgttaatatttcccgggcgagcaatgtaaggtgtatcggggaattgtgctttcagttctggaactaatgggccgttaggaccggtttcaaaactggtggtaagaatagttggtaagttgaaatacttagccaggtcacccagcgccagcacgttatttttaaacttatcgggttcgatatcccgtacaagggaaagtaaaccagcctggtgatcaacaagcaaaacggcagcatcatttttatcaagacgaacatacggtttggtcatcctcttctcctttcgagagtcagtggtacgtctgaaatcgatcagacgcgatgcattgctctgaaagcatagacgggaaatatgagtttgctgtgaccatgaaatttttcgactgaacgaagcgtatgaaatttgtgttagttcaataaaaacaatcagatgagactaatcatctcttcagcattagcgttatgaatgagtaatataaatcgataataccgccgctgggatatcgcgtattttcacccattgacaatgtttttggcggtggcatgatgcgcatgaaatttgaacttcctcacggttttaattcatgtccacgtatacccagcctgtcatgcttttgctgtctggcctgcttttgttgactctggcgattgcggtgttaaatacactcgtgccgctttggctcgcccaggaacacatgtccacatggcaggtaggcgttgtcagcagttcctattttaccggcaaccttgtcggtacattgctgacagggtatgtcattaagcgcattggctttaaccgcagctattatctggcctccttcatttttgccgctggctgtgccggccttggcctgatgattggattctggagctggttggcttggcgttttgtcgcgggcgtcggctgtgccatgatttgggtggttgttgagagcgcgctgatgtgcagtgggacgagtcgtaaccgtgggcgtttgcttgctgcgtatatgatggtttattacgtgggaacgtttttaggccagttactggtcagcaaagttagtaccgagctgatgtccgtattgccgtgggttacaggtttgacgttggcagggatcttaccgctgttgtttacgcgtgtgctgaatcagcaggctgaaaaccatgatagcacgagtattacgagtatgctaaaactccgtcaggcgcggcttggcgtgaatggctgcattatcagtggaatcgttctgggatctctatatggcctgatgccgctgtacctcaatcacaaaggggtgagcaatgccagcattggtttctggatggcggtactggtcagtgcgggtatccttggacaatggccgattggacgtctggcggataagtttggtcgactgctggtgttgcgtgttcaggtctttgtcgtcattctcggcagtatcgcgatgcttagccaggcggcgatggccccagcgttattcatcctcggtgccgctggctttacgctatatccggtggcgatggcatgggcttgcgagaaagttgaacatcatcaactggtggcgatgaaccaggccttactgttgagctatactgtgggaagtctgcttggcccgagttttaccgctatgctaatgcagaatttctccgataatttattgtttatcatgatcgccagcgtaagctttatctatttgctgatgctgctgcgcaacgccggtcatacgccgaaacccgttgctcacgtgtaaatgaattcaagcagagtgtgaacttactgtttcacactctgcttttttgtttcttctatctgacttgctttattccaaattttattcgtttaaaaataaaatgtgcagcaggttataattttgcatttcgctatttccgcacttcttatttgccgcgcataatccctcgttttaccgatgcccctttaattttggcgaaggatttgtctatggctgggaatgttcaggaaaaacagttgcgatggtacaacattgcgctgatgtcttttatcactgtctggggttttggcaacgttgttaataactatgccaaccaggggctggtggttgtttttagttgggtgtttatctttgcactctatttcacaccttatgcgctaattgttggtcagttaggcagcaccttcaaagatgggaagggcggggtcagtacctggattaaacacacgatgggacccggactggcttatctcgccgcgtggacctactgggtggtgcatattccctatctggcacaaaaaccccaggcaattctgattgcgctcggttgggcgatgaaaggcgacggtagcctaatcaaagaatatagtgtcgtagcgttacaggggttaacgctggtgctgtttatcttctttatgtgggttgctagtcgcggtatgaaaagcctgaaaatcgtcggttctgtggcagggattgctatgtttgttatgagtctcctgtatgtggcgatggcggtaaccgcgcctgcaattactgaagtgcatattgcgaccacaaacattacctgggaaacgttcattcctcatatcgactttacctacattaccactattagtatgctggttttcgcggttggcggagcagagaagatttctccttacgttaatcaaacgcgcaacccaggaaaagaatttccaaaagggatgttatgcctggcggtgatggttgcggtttgtgccattctgggcagcctggcgatggggatgatgtttgatagccgtaatatcccggatgacttaatgaccaacggtcagtattacgcctttcagaagctgggcgagtattacaacatgggtaatactttaatggtgatttacgccattgcgaataccctgggacaagtagcggcgctggtattcagcattgatgccccgcttaaagtgctattaggtgatgctgacagcaaatatattccagccagtttatgtcgtaccaacgcttctggtacgcccgttaatggctattttctgaccctggtactggtggcgattctgattatgctgccgactctcggcattggtgatatgaacaatctctataaatggctgttgaaccttaatagcgtagtgatgccgctgcgttatttatgggtatttgttgcatttattgcagtcgttcgcttggcgcagaaatataaaccagaatatgtctttattcgtaataagcctctggcaatgaccgtcgggatttggtgttttgcctttaccgcctttgcctgtttgacggggatcttcccgaaaatggaagccttcactgcagagtggaccttccagttggcgctgaatgttgcaacgccgtttgtgctggtaggattaggactgatattcccgctgctggcgcgtaaagcgaatagtaaataattattgtggtcggtgacgctgactctggcagatctgacccgtttttacataatcgagaaatgcgcgcaagccgcaggacatatactggcggtttggataatagatctggaagcctggacgctctgtgctccagtcttccagtacacattctaaacgaccagtatcaaggtactccttgatctgttcatagagcagatacccgataccagcacccatcaaaacggcctccagttcagcatcaacatcatccagaatgatatttcctgcgacagcaatttccagctcctttgcaaattgccagtggaaaggtttgccgctgggataacgaaaaacaacacattgatgattaagcagatcatgaggatggcggggtttgccatatcttgcaaagtactctggcgttgctgctacacataatttcactggcgggccgatcgccacgctgatcatatctttttcgacgatgcaactaagtcgaacgccagcgtcaaagccctgttggacgatatcgacaagagagtcgtcagttgtgagctcgactttaatatcaggatattcacgtgtgaaaccaaccagtaaagacattaaaaatatacgtgcagctacccgggcggcattgattttgagcgttcctgtcggtgtcagacgaaaatcattcatctcatctaacatgatctgaatttcgtcgaaagctgggcgcaatcgttcatagagattagaacccgcttccgttaagcttacgcttcgggttgtccgattgaataagcgaattttaagacgttgttccagtgttttaatactatggctaatggcggagctggataagcctaactcatcgcccgctgcacgaaagctttgattacgggccacggcaaagaaagtggcaaagtcagacatattcatccgcattagtgaaaatccttcattaactcatcctgaatcatcacgtttacaggattatgccgcctgcgtaaagtgcgctccagaacttaacgtggaggtaaaattatgcagtctgaacgtatttatttggtatgggcccatcctcgtcatgatagtttgaccgcacatattgctgatgcgatccatcagcgggcaatggagcggaaaatacaggtgacggaactcgatttatatcggcgtaatttcaacccagtgatgacgccggaagatgaaccagactggaagaatatggataaacgttattctccagaggttcatcagctttatagtgagctgcttgaacatgacacgttagtggtggtttttcctctctggtggtacagcttcccggcaatgctaaaaggatatattgacagagtatggaataatgggctggcttatggagatgggcacaaattaccattcaataaagttcgttgggtggcgctggttggaggagacaaagaaagttttgtccagatgggctgggaaaaaaatataagcgattatttaaaaaatatgtgcagttatcttggtattgaagatgccgatgtcactttcttgtgtaatacagtggtattcgatggggaagaacttcacgcgagctattatcagagcttattatctcaggtacgggatatggtagatgcactataagatgtgttaaaaacgctgtagcagaatgaagcgcggaataaaaaagcggcaactcaataaagttgccgctttacggggaaattagaacattaccttatgaccgtactgctcaagaatgcctttcacgcgttccatggtctctttcttcggtggtttaacaccgtcgagtttgtactcttcacccattgccacccatttgtgtttgcccagctcgtggtaggggagaagctcgattttctcaacgttgcccatatcacgggtaaattcaccgaggcgatgcgcactatcgtcatcgtcagaccagcctgggacaacaacgtagcggatccacaccttcacatttttgttcgccagatatttagcgaactccagcgtgcggtggttggaaactccaaccagattttggtggatctcgtcgttcatctgtttgagatcgagcattaccaggtcggttacttccagcagttcatcaatcaccggatcgtaacgacgaacaaaaccgttggtgtccagacaggtatgaatgccttcttttttgcaggcgcggaaccagtcacgaacaaactcagcttgcaggattgcttcaccgccggatgcggtaacgccgccgccggaagcgttcataaagtggcgataggtcaccacttccttcatcaaatcttcaacggtaacttctttaccgccatgcgtgtcccaggtgtcgcggttatgacaatacaggcagcgcatcaggcagccctggaaaaaggtgataaagcgaatacctgggccgtctacggttccacaggattcaaaggagtgaatgcgaccaataacactcattgcggtgtttctccagatgtggcccatctgaggccgtgttggtgcgcagctcgaaggctacgtcgagtctgttttggcagtcaccttaaagtatagatagctgacaaaaaaggctctcgcgctaaaaaaggccccactttcgtggagcctttattgtacgctttttactgtacgatttcagtcaaatctaattacatagattgagtgaaggtacgagtaataacgtcctgctgctgttctttagtcaggctgttgaaacgtactgcgtagccagatacacggatggtcagctgcggatatttttccgggttttccatcgcgtcgagcagcatttcacggttcatcacgttaacgttcaggtgctgaccaccttcgatggatgcttcgtggtggaagtaaccatccatcagaccagccaggttggtcttacgaacttcgtcgtctttacccagtgcgttcggaacgatagagaaggtgtaggagataccatctttagcgtaagcaaacggcagtttagcaacggaagtcagagaggctactgcacctttctggtcacgaccgtgcatcgggttagcacccggtccgaacggcgcgccagcacgacgaccgtctggggtgttacccgttttcttaccatacacaacgttagaagtgatggtcagaacagactgagtcgggatagcgtcacggtaggtgtgcagtttctgaattttcttcatgaaacgttctaccaggtcaacagccaggtcatctacacgcggatcattgttaccaaactgcgggtattcgccttcgatttcgaagtcgatagccagaccgtcttcgtcacgaatcggtttaactttcgcatatttgattgcagacagggagtcagcagcaacggacagaccagcgataccacacgccatggtgcggataacgtcacggtcgtgcagcgccatcagagaggcttcgtagctgtacttgtcgtgcatgtagtggatgatgttcagtgcagtgatgtactgtttagccagccagtccatgaagtgatccatgcgctccatcacttcatcatagttcaggacatcgcctttgatcggttcagacttcggaccaacctgcattttcagtttttcgtcaacgccgccgttgattgcgtacagcatggttttcgccaggtttgcacgcgcaccgaagaactgcatttgtttaccaacgatcatcgggcttacgcagcaagcaatagcgtagtcatcgttgttgaagtccggacgcatcaggtcatcgttctcatactgcagagaagaggtgtcgatggacactttagcggcgaatttcttgaagttcagcggcagtttttcagaccacagaatggtcatgttcggttccggagacggacccatggtgtacagggtgttcaggaaacggaagctgtttttggtaaccagggtacgaccgtcgaggcccataccaccgatagattcggttgcccagatcgggtcgccagagaacagttcatcgtattccggagtacgcaggaagcgaaccatacgcagtttcatgaccaggtggtcaaccatttcctgcgcttcttgttcggtgatcttgccagctttcaggtcacgttcgatgtacacatccaggaaggtggaggtacgaccgaaggacattgcagcaccgttctgagacttaacagcagccaggtagccgaagtaagtccactggatagcttcctgagcgttggtagccggaccagagatgtcgtagccgtatttcgcagccatttctttcatctgacccagagcgcggtgctgttcagcgatttcttcgcgcagacggatagtctgttccaggtttacgccgttttccagatcagcctgcagagaagtgaactgtgccagtttgtctttcatcaggtagtcgataccgtacagcgcaacgcgacggtagtcaccgatgatacggccacggccatatgcatctggcagaccggtcagaacaccagatttacggcaacgcaggatgtccggagtgtaaacgtcgaacacgccctggttgtgagttttacggtattcagtgaagatttttttgatcatcggatccagttcgcggttgtacgctttgcaggaaccttcgatcattttgataccaccgaacgggataagagcacgtttcagcggagcttcagtctgcagaccaacgattttctcaagctgcttgttgatgtagccagcgtcgtgagaggtgatggtggaagcaacagcggtgtcaaagtcaactggcgcgtgagtgcggttttccagtttaacgccttccattactttgtcccacagggtggtggtcgcttcagtagcgccagccaggaaggactcgtcaccctcgtacggagtgtagtttttctgaatgaagtcacggacgtttacttcattctgccagtcacctttggtaaaaccttcccaggctgtggctaacttttcattaagctcggacatgtaacacctaccttcttaagtggattttttatttactgcgtacttcgacaaccattaatggtggtcgttttcacgcaggtaaatgacccagtatgtcaacccaaccaacaaaccaccaccgataatgttgccgatcgtaaccggaatcaggttatcagtgatgaaattcatcacggtcaggtgagaaaaattttccggtgcagaaccgactgcggtccaaaattccggggatgcgaagtcgcggattacaatacccatcgggatcataaacatgtttgcgatactgtgctcaaaaccgctggcaacaaacatcgcgaccggcagcaccataatgaacgctttgtccatcaggctgcggccagaataactcatccatactgccagacataccatcaggtttgccaggataccaagacagacggcctcaataaaagtatggtgcactttgtggtcggcggtttgtaggacgtttagtccccattgaccatttgcggtcatatactcgccggaaagccacattaaaagtacaaacagcagtgcgccgaccaggttgccaaaatagacatttagccagtttttcgccaactgaccccaggtgatgcgcccactcgccttagcaacaacaatcaacacggtggaagtaaagagatcggctccgcagacaacacaaagaatcagccccagagagaagcaaatgccgccaaccagttttgccatgccgaagggcattgtgcctgtgccagtggttgctgtgatatagaagacgaatgcgatactgatgaaaacaccggcggtaatcgccagatagaaagtcttaagcggatgtttcgttgctttatagacacccgcctcttcggccactttggccattgcagcaggaagtaaaagatcaaaagggttgtcagctttcacactaactctctctttattaagtcggcgacgagatactaacaaagcattatagatgagaaattgatatagatcatatctcgcctggcttataggcccgtaactcgcatggtttttatgcaaatacggagtaaatatttgattatccaaataaaaataaattttaaaaattaacaaatgagttgaattttttccgcatcctccgctaaaacagttaattaaaagggagcatcaggcgaataaagtaacaatatcgatcgtatttattaaatacaaattaccgatatttaaccttataattacaattattttattaatgcaaatatatgtaaagcggggcattaaaaaaacgccccgtaatataactcagactaatcattaagcctacattgcgtaggctatttgattttattttgcccagaatgctgctttggcgcgctgcagcttttcgtaggccttcaacaagctctgatgtgcagcaaacgcgtgcagatcgctatctaccggttgcaggccgtaaaacgccgcttcgccgctcattgccgcactggcggcttctacggcatctgcgccgtacatgcgaacaaacgcattcagatattgcagcggctggcgatcttcttcctgtgccagtaataacaacgtttgcaggcagcgataatagttggcgcgttccggactaaatacactactgttaaactccatcgtccattcggtccagaccagagcctgttccagatcgccaccagccagcgccagcatggcttttaattcaccgatacgcagggtgtaccaaccgttatcgctcccggtcgccagacccaacagctcacgcacgcgggtaaagtcatcaaaaccttcttcatccagttgctcgatgaggttcaggtaatcttctttttcccactcgctgcctggtaggctaagaatcgtttcacgtaaatggctgcccatactgttattcgcgagccacagatcttcagccggataaatatcggacatgccaggcacgataatacggcaagcataaacgcccagatgctcgtaatcggcaatataaacttctttatcttctttgttgaagatagccatcagtgtggcgaactcttcttccgtggtgccggagaaattccagtccacaaacggataatcggcatcctgcttgaacaggtcccaggagattaaaccgctggaatcgataaagtgcgtttcgaggttggtatgttcagcgacttcttcatcatcgaaggttggcggagtaaacacatccaaatctttcaggccacgaccttgcagcagctcggtcacggtacgttccagtgctacgccaaaatcaggatgcgcaccgaaagaggcaaagcaggtaccgttagcaggattgaacagtaccacgcaaatcaccggatactggccgccaaggctaccgtcataagcgaagattgggaaaccctccgcttccagcgtttcgatggcttcaactactgctgggtaacgcgccagcacgtctgccgggatctctggcaggctgatgctttcagcaataatgcggtttttcacgtagcgttcgaaaacttcagacaatccctgaacgcgtgcttcgttgcgggtattacctgcggacataccgttggagacgtacaggttaccaatgatattcatcggaatataaacggtctgattgtcggactgacgcgtaaacggcaggccgcaaataccacgatcttcgttaccggattgtaggtcaatcagcatgctgccggtcagttcattctccggatcataaaacgcgcgcagacggtcatcgagcagcccttctggcacatcgtcattttcggtcagtgggaaccatttttcgttgggataatgcacgaacggaccgttggcgatggtttcgcccagccagaagtccgcaaaaaagtagttggtactgagacgctcgaaatattcaccgagtgcagaagccagcgccgctttcttggttgcgcctttaccgttggtaaaacacagtgcgcactctttgtcgcgaatatgtacagaccagacgttaggcacgggattcagccaggaggcctcttcaatctgaaagccgaggtcactaagtttttgctggaagcgagcgatggaatcttccagagcggcatctttgccggggataaatgtttgcgtcatgaaaatcactttagtcgtacggaaagcgcgcaataatacgggttttatctcaaaggcgctatcaccgccgccatgccgatgaactgttgactatgcttttagcggataaaccacgttaagagcataaaaatgaaggcgttcgatctccaccgtatggcatttgataaagtgccttttgatttccttggcgaagttgcactacgtagtctttatacctttgtactggtctttttgttcctcaaaatgaccggaagacgcggtgtgcggcagatgagcctgtttgaagttttaatcattctgacgctgggaagtgcggcgggagatgtggcgttttatgatgatgtgccgatggtcccggtacttatcgtctttattactctggcgttgttataccgcctggtaatgtggttgatggcgcacagtgaaaaactggaagatcttctggaaggcaagccagttgtcattattgaagatggcgagctggcctggagcaaactcaataactccaacatgacggaatttgagttctttatggagctacgattgcgtggcgtggagcagctggggcaggtacgtctggcgattctcgaaaccaacgggcaaatcagtgtctatttctttgaagatgacaaggtgaaaccgggtttacttattttacccagtgattgtacgcagcgttacaaagtggtgccggagagcgcggactatgcctgtattcgttgtagtgaaatcattcatatgaaagcgggggaaaaacaattatgtccgcgctgtgcaaatccagaatggacgaaggcaagtcgggcaaaacgggtgacctgacagtaaaaacatcggctttttgctaataatccgagagattcttttgtgtgatgcaagccacatttttgccctcaacggttttactcattgcgatgtgtgtcactgaatgataaaaccgatagccacaggaataatgtattacctgtggtcgcaatcgattgaccgcgggttaatagcaacgcaacgtggtgaggggaaatggctcaaatcttcaattttagttctggtccggcaatgctaccggcagaggtgcttaaacaggctcaacaggaactgcgcgactggaacggtcttggtacgagcgtgatggaagtgagtcaccgtggcaaagagttcattcaggttgcagaggaagccgagaaggattttcgcgatcttcttaatgtcccctccaactacaaggtattattctgccatggcggtggtcgcggtcagtttgctgcggtaccgctgaatattctcggtgataaaaccaccgcagattatgttgatgccggttactgggcggcaagtgccattaaagaagcgaaaaaatactgcacgcctaatgtctttgacgccaaagtgactgttgatggtctgcgcgcggttaagccaatgcgtgaatggcaactctctgataatgctgcttatatgcattattgcccgaatgaaaccatcgatggtatcgccatcgacgaaacgccagacttcggcgcagatgtggtggtcgccgctgacttctctagtaccattctttcccgtccgattgacgtcagccgttatggtgtaatttacgctggcgcgcagaaaaatatcggcccggctggcctgacaatcgtcatcgttcgtgaagatttgctgggcaaagcgaatatcgcgtgtccgagcattctggattattccatcctcaacgataacggctccatgtttaacacgccgccgacatttgcctggtatctatctggtctggtctttaaatggctgaaagcgaacggcggtgtagctgaaatggataaaatcaatcagcaaaaagcagaactgctatatggggtgattgataacagcgatttctaccgcaatgacgtggcgaaagctaaccgtagccggatgaacgtgccgttccagttggcggacagtgcgcttgacaaattgttccttgaagagtcttttgctgctggccttcatgcactgaaaggtcaccgtgtggtcggcggaatgcgcgcttctatttataacgccatgccgctggaaggcgttaaagcgctgacagacttcatggttgagttcgaacgccgtcacggttaatgccgaaattttgcttaatccccacagccagcctgtggggtttttatttctgttgtagagagttgagttcatggaatccctgacgttacaacccatcgctcgtgtcgatggcactattaatctgcccggttccaagagcgtttctaaccgcgctttattgctggcggcattagcacacggcaaaacagtattaaccaatctgctggatagcgatgacgtgcgccatatgctgaatgcattaacagcgttaggggtaagctatacgcttagtgccgatcgtacgcgttgcgaaattatcggtaacggcggtccattacacgcagaaggtgccctggagttgttcctcggtaacgccggaacggcaatgcgtccgctggcggcagctctttgtctgggtagcaatgatattgtgctgaccggtgagccgcgtatgaaagaacgcccgattggtcatctggtggatgcgctgcgcctgggcggggcgaagatcacttacctggaacaagaaaattatccgccgttgcgtttacagggcggctttactggcggcaacgttgacgttgatggctccgtttccagccaattcctcaccgcactgttaatgactgcgcctcttgcgccggaagatacggtgattcgtattaaaggcgatctggtttctaaaccttatatcgacatcacactcaatctgatgaagacgtttggtgttgaaattgaaaatcagcactatcaacaatttgtcgtaaaaggcgggcagtcttatcagtctccgggtacttatttggtcgaaggcgatgcatctagcgcttcttactttctggcagcagcagcaatcaaaggcggcactgtaaaagtgaccggtattggacgtaacagtatgcagggtgatattcgctttgctgatgtgctggaaaaaatgggcgcgaccatttgctggggcgatgattatatttcctgcacgcgtggtgaactgaacgctattgatatggatatgaaccatattcctgatgcggcgatgaccattgccacggcggcgttatttgcaaaaggcaccaccacgctgcgcaatatctataactggcgtgttaaagagaccgatcgcctgtttgcgatggcaacagaactgcgtaaagtcggcgcggaagtggaagaggggcacgattacattcgtatcactcctccggaaaaactgaactttgccgagatcgcgacatacaatgatcaccggatggcgatgtgtttcagcctggtggcgttgagtgatacaccagtgacgattcttgatcccaaatgcacggccaaaacatttccggattatttcgagcagctggcgcggattagccaggcagcctgaatgaacaacgggcaataaatagccaaatctttctttatcaaaacgtcggcacattgtcggcgttttttttcggaccttgtgagtcattttgattaatggtagcgtcgcttgtcaatgtaagttgttgatacataatatttatatatgattaatcaacggatgattcacatgaagaatactaaattactgctggcgattgcgacctctgcagcattactgacagggtgtcaaaatacccacggtattgataccaatatggctatcagctccggtttaaatgcctataaagcagcaacattaagcgatgccgatgcaaaagcgattgccaatcagggctgtgccgaaatggacagcggcaatcaagtcgcaagtaaatccagcaagtacggtaaacgtctggcaaaaatcgccaaagcattgggtaacaatattaatggcacgccggtcaactataaggtttatatgaccagcgacgtcaacgcatgggcgatggcgaacggctgtgttcgtgtctacagtggcctgatggacatgatgaatgacaacgaaattgaaggcgttctgggccatgaactgggccacgtcgcgttgggtcacagcctggctgaaatgaaagcttcttatgcgatcgttgccgcacgcgatgccattagtgctaccagcggtgtggcttcccagctttcccgcagtcaattaggtgatatcgcagaaggcgctatcaatgctaaatactcccgtgataaagagtccgaagcagatgatttctcctttgatctgttgaagaaacgtggcatcagcacccaggggctggttggcagctttgaaacactggctagcctggatggcggtcgcacccagtccatgtttgactctcacccaccaagtacagagcgtgcgcaacacatccgtgatcgtatcgcctctggtaagtaaatcattgtcatctttcgggctggtcttctgccagcccgctataattgcgcaataaatccccatctgaatacagacaaaactggtttttgcacacaacgttaacgatttgtggcgtcggcgcgtataatgcgcgcggttatgttaacggtacgcctgttttaaggagataaagatgacggcaattgccccggttattaccattgatggcccaagcggtgcagggaaaggcaccttgtgtaaggctatggcggaagcgttgcaatggcatctgctggacagcggtgcaatttatcgcgtactggcattggcggcattacatcaccatgttgatgttgcgagcgaagatgcgctggtaccgctggcatcccatctggatgtacgttttgtgagcaccaatggcaatctggaagtgatcctcgaaggggaagatgtcagcggcgaaattcgtactcaggaagtggcgaatgcagctagtcaagtcgcggcattcccacgcgttcgtgaagcattattgcgtcgccaacgcgcgtttcgcgaattaccaggtctgattgccgatggccgcgacatgggaacggtggtattccctgatgcaccagtgaaaattttccttgacgcctccagcgaagaacgtgcgcatcgccgcatgctacagttgcaggagaagggctttagtgttaactttgagcgccttttggccgagatcaaagaacgcgacgaccgcgatcgtaaccgagcggtagcgccactggttccggcagccgatgctttagtgttggattccaccaccttaagcattgagcaagtgattgaaaaagcgctacaatacgcgcgccagaaattggctctcgcataagcgaccgaatttgcagtacccccgttgcaatggaatgacagcgggtatgttaaacaaccccatccggcatggagccaggtggacgttaaatataaacctgaagattaaacatgactgaatcttttgctcaactctttgaagagtccttaaaagaaatcgaaacccgcccgggttctatcgttcgtggcgttgttgttgctatcgacaaagacgtagtactggttgacgctggtctgaaatctgagtccgccatcccggctgagcagttcaaaaacgcccagggcgagctggaaatccaggtaggtgacgaagttgacgttgctctggacgcagtagaagacggcttcggtgaaactctgctgtcccgtgagaaagctaaacgtcacgaagcctggatcacgctggaaaaagcttacgaagatgctgaaactgttaccggtgttatcaacggcaaagttaagggcggcttcactgttgagctgaacggtattcgtgcgttcctgccaggttctctggtagacgttcgtccggtgcgtgacactctgcacctggaaggcaaagagcttgaatttaaagtaatcaagctggatcagaagcgcaacaacgttgttgtttctcgtcgtgccgttatcgaatccgaaaacagcgcagagcgcgatcagctgctggaaaacctgcaggaaggcatggaagttaaaggtatcgttaagaacctcactgactacggtgcattcgttgatctgggcggcgttgacggcctgctgcacatcactgacatggcctggaaacgcgttaagcatccgagcgaaatcgtcaacgtgggcgacgaaatcactgttaaagtgctgaagttcgaccgcgaacgtacccgtgtatccctgggcctgaaacagctgggcgaagatccgtgggtagctatcgctaaacgttatccggaaggtaccaaactgactggtcgcgtgaccaacctgaccgactacggctgcttcgttgaaatcgaagaaggcgttgaaggcctggtacacgtttccgaaatggactggaccaacaaaaacatccacccgtccaaagttgttaacgttggcgatgtagtggaagttatggttctggatatcgacgaagaacgtcgtcgtatctccctgggtctgaaacagtgcaaagctaacccgtggcagcagttcgcggaaacccacaacaagggcgaccgtgttgaaggtaaaatcaagtctatcactgacttcggtatcttcatcggcttggacggcggcatcgacggcctggttcacctgtctgacatctcctggaacgttgcaggcgaagaagcagttcgtgaatacaaaaaaggcgacgaaatcgctgcagttgttctgcaggttgacgcagaacgtgaacgtatctccctgggcgttaaacagctcgcagaagatccgttcaacaactgggttgctctgaacaagaaaggcgctatcgtaaccggtaaagtaactgcagttgacgctaaaggcgcaaccgtagaactggctgacggcgttgaaggttacctgcgtgcttctgaagcatcccgtgaccgcgttgaagacgctaccctggttctgagcgttggcgacgaagttgaagctaaattcaccggcgttgatcgtaaaaaccgcgcaatcagcctgtctgttcgtgcgaaagacgaagctgacgagaaagatgcaatcgcaactgttaacaaacaggaagatgcaaacttctccaacaacgcaatggctgaagctttcaaagcagctaaaggcgagtaattctctgactcttcgggatttttattccgaagtttgttgagtttacttgacagattgcaggtttcgtcctgtaatcaagcactaagggcggctacggccgcccttaatcaatgcagcaacagcagccgcttaatttgcctttaaggaaccggaggaatcatgaccaagagtgaattgatagaaagacttgccacccagcaaagccacattcccgccaagacggttgaagatgcagtaaaagagatgctggagcatatggccagcactcttgcgcagggcgagcgtattgaaatccgcggtttcggcagtttctctttgcactaccgcgcaccacgtaccggacgtaatccgaagactggcgataaagtagaactggaaggaaaatacgttcctcactttaaacttggtaaagaactgcgcgatcgcgccaatatttacggttaagttttttactcaaacttgaacgagagaaaagcacctgtcgggtgcttttttcatttctctaatctggaactggaagctgcctcgcagagttttgaacagttttcaccctttcgttaaattcttctgaatatgcctcggggaacgcaaaattcccaccagacaaccgctcaacaaagttgcacactttccataaacagggaggggtgcatgaaaataacgacagtcggtgtatgcataattagcggaatttttccgttgctgattttgccccaattgcctgggacattaacccttgcgtttctgactctcttcgcctgcgtactggcatttatccctgttaaaaccgtccgttatatcgcgctgacgttgctgtttttcgtttggggcatattaagtgcaaagcaaattttgtgggcaggagaaaccttaactggcgcgacgcaggatgcaattgttgagatcactgcaactgacggcatgaccactcattacggtcaaattactcatctacaaggtcgacgtatattccctgcgagtggtctcgtgatgtatggcgaatatcttccgcaagcggtttgtgctggacaacaatggagtatgaaactcaaagttcgtgcagttcatggccaacttaatgatggcggctttgatagccagcgttatgccattgcccagcatcagccgctcaccggccgttttctgcaggcaagtgtcattgaaccgaattgtagcctgcgtgcacagtatctggcgagtctacaaacaacgctgcaaccctatccgtggaatgcggttattcttggtttaggtatgggggaacggttatccgtccccaaagaaatcaaaaatatcatgcgcgatactggaacggcgcatttaatggcgataagcggattgcacatcgcttttgcggcgttgctggctgccggactcattcgcagtggacaaatttttctgcctgggcgctggatccactggcaaataccattaattggcggaatctgctgtgctgctttttatgcctggttgacgggaatgcaacctcctgcattgcgtaccatggtggcgcttgctacgtggggaatgcttaagttaagtgggcgacagtggagtggctgggatgtatggatatgttgtctggcggcaattttgctgatggatcctgttgccattctcagccaaagtttatggctctctgccgctgcggtcgcggcattgatattttggtatcagtggtttccctgtcctgagtggcaactgccgccggtattgcgtgcagttgtttccctcatccatctgcaactgggaatcacacttctgcttatgcccgtgcaaatcgtcatatttcatggcattagtctgaccagctttattgcaaatctattagcaattcccttggtgacatttatcacggttccgttgatcctcgccgcgatggttgtgcatttaagcgggccgttaatcctggagcaagggttatggtttcttgccgaccggtctttggctttacttttctgggggttaaagagtttgccggaagggtggatcaacattgctgaatgttggcaatggctaagtttttccccatggttcttactggtggtatggcgattaaacgcctggcgaacgttgccagcaatgtgtgtggctggaggcttgctgatgtgctggccgctgtggcaaaaacctcgacctgacgagtggcagctgtacatgcttgatgtcgggcaagggctggcaatggtgatagccagaaacggcaaagcgattctctatgacacaggactggcctggcctgaaggggatagtgggcaacaactgattatcccctggctccactggcataatcttgaaccggaaggcgttattctgagccatgaacatctggatcaccggggagggctggatagtatattgcatatatggccgatgttatggatcagaagtccgttaaactgggaacatcatcagccctgtgtgcgtggcgaagcgtggcaatggcaaggattgcgtttcagcgcgcactggcctttacaaggtagcaacgataaaggaaataaccattcctgtgtggttaaggttgatgacgggacgaatagcattcttctaaccggtgatattgaagccccagctgaacaaaagatgctaagccgttactggcagcaagtgcaggcaacattgcttcaggtacctcaccatggcagtaataccagtagtagcttgccattaattcagcgagtgaatggaaaagtggcactcgcaagcgcaagccgctataacgcatggcgactgccctctaacaaagttaagcatcgctatcaactgcaaggatatcaatggattgatactccacatcaaggtcaaacaacggtcaattttagtgcgcaaggctggcggattagcagcctcagggagcaaattttacctcgttggtatcatcagtggtttggcgtgccagtggataacgggtaaaatatgcggctatttcaacaaatgctggttttttgaatgcataacgacaaagatctctctacgtggcagacattccgccgactgtggccaaccattgcgcctttcaaagcgggtctgatcgtggcgggcgtagcgttaatcctcaacgcagccagcgataccttcatgttaagcctccttaagccacttcttgatgatggctttggtaaaacagatcgctccgtgctggtgtggatgccgctggtggtgatcgggctgatgattttacgtggtatcaccagctatgtctccagctactgtatctcctgggtaagtggaaaggtggtaatgaccatgcgtcgccgcctgtttggtcacatgatgggaatgccagttagtttctttgacaaacagagtacgggtacgctgttgagtcgtattacctacgattccgaacaggttgcttcttcttcttccggcgcactgattactgttgtgcgtgaaggtgcgagcatcatcggcctgttcatcatgatgttctattacagttggcaactgagcatcattttgattgtgctggcaccgattgttagcattgcgattcgcgttgtaagcaagcgttttcgcaacatcagtaaaaacatgcagaacaccatggggcaggtgaccaccagcgcagaacaaatgctgaagggccacaaagaagtattgattttcggtggtcaggaagtggaaacgaaacgctttgataaagtcagcaaccgaatgcgtcttcaggggatgaaaatggttagtgcctcttccatctctgatccgatcattcagctgatcgcctctttggcgctggcgtttgttctgtatgcggcgagcttcccaagtgtcatggatagcctgactgccggtacgattaccgttgttttctctagtatgattgcactgatgcgtccgctgaaaagcctgaccaacgttaacgcccagttccagcgcggtatggcggcttgtcagacgctgtttaccattctggacagtgagcaggagaaagatgaaggtaagcgcgtgatcgagcgtgcgactggcgacgtggaattccgcaatgtcacctttacttatccgggacgtgacgtacctgcattgcgtaacatcaacctgaaaattccggcagggaagacggttgctctggttggacgctctggtagcggtaaaagtaccatcgccagcctgatcacgcgtttttacgatattgatgaaggcgaaatcctgatggatggtcacgatctgcgcgagtataccctggcgagcttacgtaaccaggttgctctggtgagccagaatgtccatctgtttaacgatacggttgctaacaacattgcttacgcacggactgaacagtacagccgtgagcaaattgaagaagcggcgcgtatggcctacgccatggacttcatcaataagatggataacggtctcgatacagtgattggtgaaaacggcgtgctgctctctggcggtcagcgtcagcgtattgctatcgctcgagccttgttgcgtgatagcccgattctgattctggacgaagctaccagcgctctggataccgaatccgaacgtgcgattcaggcggcactggatgagttgcagaaaaaccgtacctctctggtgattgcccaccgcttgtctaccattgaaaaggcagacgaaatcgtggtcgtcgaggatggtgtcattgtggaacgcggtacgcataacgatttgcttgagcaccgcggcgtttacgcgcaacttcacaaaatgcagtttggccaatgatcgaaaaaatctggtctggtgaatcccctttgtggcggctattgctgccactctcctggttgtatggcctggtgagtggcgcgatccgtctttgctataaactaaaactgaagcgcgcctggcgtgcccccgtaccggttgtcgtggttggtaatctcaccgcaggcggcaacggaaaaaccccggtcgttgtctggctggtggaacagttgcaacagcgcggtattcgcgtgggggtcgtaagccggggatatggtggtaaggctgaatcttatccgctgttattgagcgcagataccacaacagcacaggcgggtgatgaacctgtgttgatttatcaacgcactgatgcgcctgttgcggtttctcccgttcgttctgatgcggtaaaagccattctggcgcaacaccctgatgtgcagatcatcgtaaccgacgacggtttacagcattaccgtctggcgcgtgatgtggaaattgtcgttattgatggtgtgcgtcgctttggcaatggctggtggttgccggcggggccaatgcgtgagcgagcggggcgcttaaagagcgttgatgcggtaatcgtcaacggcggtgtccctcgcagcggtgaaatccccatgcatctgctgccgggtcaggcggtgaatttacgtaccggtacgcgttgtgacgttgctcagcttgaacatgtagtggcgatggcggggattgggcatccgccgcgcttttttgccacgctgaagatgtgtggcgtacaaccggaaaaatgtgtaccgctggccgatcatcagtctttgaaccatgcggatgtcagtgcgttggtaagcgccgggcaaacgctggtaatgactgaaaaagatgcggtgaaatgccgggcctttgcagaagaaaattggtggtatttgcctgtagacgcacagcttagtggtgatgaaccagcgaaactgcttacgcaactaaccttgctggcttctggcaactaattacgccgcggcagcgttcgattgatggagtcatgaatgagcctgccgcacctctcccttgctgatgcgcgtaatcttcaccttgccgcacaaggcctgttaaacaaaccccgccgtcgagcgagcttggaggatattccggcaacgatctcccgcatgtccttgctgcaaatcgataccatcaatattgttgcccgtagtccatatctggtgcttttcagtcgtctgggaaattatcctgcccagtggctggatgagtctctggcgcgtggcgaattaatggaatactgggcgcatgaagcctgctttatgccgcgtagcgactttcgtcttattcgccaccgcatgctggcacctgaaaaaatgggctggaaatacaaagacgcctggatgcaggaacatgaggcggaaattgcacagttaattcagcatattcatgataaggggccggtacgtagtgccgattttgagcatcctcgtaaaggtgcaagcggctggtgggaatggaagccgcataaacggcatctggaaggtttatttactgccggaaaggtgatggtgattgaacggcgcaacttccagcgcgtttatgatttaacccaccgtgtcatgcctgactgggatgatgagcgcgatctcgttagccaaacagaagcagaaatcatcatgctggataacagtgcgcgtagcctgggaatattccgcgaacagtggctggcagattactatcggctgaaacgtccggcactggcggcgtggcgcgaagcgagggctgaacagcagcaaatcattgctgtgcatgttgaaaaattgggcaatctttggctgcatgatgatttgctgccgctactcgagcgagcgctggccggaaagctcactgcaacgcacagcgcggtacttagcccttttgatcctgttgtctgggatcgcaaacgcgcagagcagctttttgattttagctaccggctggagtgctataccccagcgccgaaacgccagtatggctattttgttctgccgttattacatcgtgggcaattagttgggcgaatggatgccaaaatgcatcgccagacaggcatccttgaagttatctctctgtggttacaggaaggtattaaaccaacgacaacgctgcaaaaagggctacgtcaggcgattactgatttcgctaactggcagcaggcaacgcgggtgacattaggatgctgcccgcaaggcctctttactgattgccgcaccggctgggaaatagaccccgtcgcataaatgattatgataagatttatgcattcataacccgatccatctggaggaactatggatcatcgtctgcttgaaatcattgcctgcccggtttgcaacggaaaactttggtataaccaggaaaaacaagagcttatttgcaaactggacaacctcgctttcccgctgcgtgatggcattccagtgttgctggaaacggaagcccgcgtgctgactgctgatgagagtaaaagttgatgtaaactgctgatgagagtaaatcatgagttttgtggtcattattcccgcgcgctacgcgtccacgcgtctgcccggtaaaccattggttgatattaacggcaaacccatgattgttcatgttcttgaacgcgcgcgtgaaagtggtgccgagcgcatcatcgtggcaaccgatcatgaggatgttgcccgcgccgttgaagccgctggcggtgaagtatgtatgacgcgcgccgatcatcagagtggaacagaacgtctggcggaagttgtcgaaaaatgcgcattcagcgacgacacggtgatcgttaatgtgcagggtgatgaaccgatgatccctgcgacaatcattcgtcaggttgctgataacctcgctcagcgtcaggtgggtatggcgactctggcggtgccaatccacaatgcggaagaagcgtttaacccgaatgcggtgaaagtggttctcgacgctgaagggtatgcactgtacttctctcgcgccaccattccttgggatcgtgatcgttttgcagaaggccttgaaaccgttggcgataacttcctgcgtcatcttggtatttatggctaccgtgcaggctttatccgtcgttacgtcaactggcagccaagtccgttagaacacatcgaaatgttagagcagcttcgtgttctgtggtacggcgaaaaaatccatgttgctgttgctcaggaagttcctggcacaggtgtggatacccctgaagatcttgagcgcgttcgcgctgaaatgcgctaatttcacttcacgacacttcagccaattttgggaggagtgtcgtaccgttacgattttcctcaatttttcttttcaacaattgatctcattcaggtgacatcttttatattggcgctcattatgaaagcagtagcttttatgagggtaatctgaatggaacagctgcgtgccgaattaagccatttactgggcgaaaaactcagtcgtattgagtgcgtcaatgaaaaagcggatacggcgttgtgggctttgtatgacagccagggaaacccaatgccgttaatggcaagaagctttagtacgcccggaaaagcccgacaactggcatggaaaaccaccatgctggcaagaagtgggactgtccgtatgccgactatttatggtgtgatgacgcatgaagaacaccccggccccgatgtcctgctactggagcggatgcgtggtgttagcgtggaggcaccagcccgaacaccagaacgctgggaacaactcaaagaccaaatcgttgaagccttactggcctggcaccgtcaggacagtcgcggttgcgtcggcgcggtcgacaatactcaggaaaatttctggcccagttggtaccggcaacatgttgaagtgctatggaccacgctcaatcagttcaataacaccggtctgacgatgcaggataagcggatcctgtttcgcactcgcgaatgtctcccggcattatttgaaggctttaacgacaattgtgtgctgattcacggtaacttctgtttacgcagcatgttgaaagatagccgcagcgatcagttactggcgatggtcgggccgggactaatgctttgggcaccgcgagaatacgaactgttccgactaatggataattctctggcggaagatttgctctggagttacctgcaacgcgcgccagtggcggagagcttcatctggcggcgttggttgtatgtgttatgggatgaagttgcgcaactggttaataccggacgatttagtcggcgcaacttcgatctggcaagtaaaagtctcttgccgtggctcgcctgatcactcttgccgtggctcgccactgctaccttttagccactgccagatacggccaagcgtttcatagccaacacgatcgctatgcatcaaccagaccggagaagggattgcccgttcccacgggttaagcgggctgtcgatggccaactgattcgccggggctggtagcggatttaacccttcctgctgaaaaaagatcatcgcccgcggcagatgacttgcggaggtcaccagcaggaaaggggcgtcaccaatcgcctgtttcactgctgcagcttcttcttcggtatcttttggcaaatccagggtgataatttgctcgcgcggcacgcccaggctttgcgcaactctggcacctacttccgctgtactcaccgtattggtttttgctacgcctcccgtgaagatcagtttacttcccggattttcgcgccataagcgaataccttcattcaggcgtggcagactgttattgattaaattagagctcggtgcccactgcgggttccaggtataaccacctccgagcaccacgatatagtccactttttggctattattccatgtcggataggtgctttcgatgggacgcagcaggcggtcggctaccggttgcaaactcaataacaagagcgccagccacccaatgctaataaaaatcttcccggttttttgaaaacggctaaaccacagcagcgccaggccagcgccaataatcaacaacatcagcggaagtggcagcaacatattgccaatcacttttttcagtgtaaaaagcatcctttctggttccttttttaaccatatagcaagggatcgccagcgatattacaccagacgggttcattctcgccgtggctgtgacaaaatagcgtctttatcagaaaacgtcttagccaaccggtggagaaagcaatgcaggatcgcaattttgatgatattgcggaaaagttttcccgtaacatttacggcaccaccaaagggcagcttcgacaggctattctgtggcaggatctcgatcgcgtgctggcggaaatgggcccgcaaaaactgcgtgtgctggatgctggcggtggagaagggcagaccgcaatcaaaatggccgagcgtgggcatcaggtcattttatgcgatctttctgcgcagatgatcgaccgcgcaaaacaggcggcagaagcaaaaggtgtgagcgacaacatgcaatttatacattgcgccgctcaggatgttgctagccatttggaaacgcccgttgatctgatattgttccatgcggtgctcgagtgggtggctgatccccgcagcgtattgcagaccctctggagtgtgttgcgtccaggcggcgtgttgagcttaatgttctacaatgcgcatggtttgttgatgcataacatggtcgccgggaattttgattacgtgcaggcgggaatgccgaaaaagaaaaaacggacgcttagcccagattatccacgcgacccggcgcaggtttatctgtggctggaagaagctggttggcaaattatgggtaagacaggcgttcgcgtgtttcatgattatctgcgcgagaaacaccagcagcgcgactgctatgaagcattacttgaattagaaacgcgttattgccgtcaggaaccgtatattaccctggggcgttatattcatgtcaccgcgcgcaaaccgcagagcaaggataaagtatgagtgaattttcccagacagtccccgaactggttgcctgggccagaaaaaatgacttctccatcagcctgccggtagaccgactctcttttctgctggcggttgccacgctgaacggcgagcgtctggatggtgagatgagtgaaggcgagctggtggatgcattccgccatgtgagtgatgcgtttgagcaaaccagcgaaaccatcggcgtgcgcgccaataacgcgatcaacgacatggtgcgtcaacgtctgctgaaccgctttaccagcgagcaggcggaagggaacgcaatttaccgtctgacgccgctcggcatcggcattactgactactacatccgtcagcgcgagttttctacgctgcgtctttctatgcagttgagcattgtggcgggtgagctcaaacgcgcagcagatgccgccgaagagggcggtgatgaatttcactggcaccgtaatgtctatgcgccactgaaatatagcgtagcagaaattttcgacagtatcgacctgacgcaacgtctgatggacgaacagcagcagcaggtgaaggacgatatcgcccagttgctgaacaaagactggcgggcggcgatttccagctgtgaattgttgcttagcgaaacttccggaacgctgcgtgaattgcaggatacgctggaagcggcaggcgacaaattgcaggctaatctgttgcgcattcaggatgcgacgatgacccatgacgatctgcatttcgtcgatcgtctggtgttcgatctgcagagcaaactcgatcgtattatcagttggggccagcaatccatcgacttgtggattggctacgaccgccacgtacacaaatttattcgtaccgcgatcgatatggataaaaaccgcgtctttgctcagcggttacgtcagagcgtacaaacctattttgatgagccgtgggcgctaacttatgccaatgccgatcgtctgctggatatgcgtgacgaagagatggcactgcgcgatgaagaagtgactggggaacttcctgaggatctggaatacgaagagtttaacgagatccgcgaacagctggcggcgatcatcgaagaacaacttgccgtgtacaaaaccagacaagtgccgctggatcttggtctggtggtacgcgaatatctgagtcagtatccgcgtgcacgtcactttgacgttgcgcgtattgttattgatcaggcggtacgtcttggcgtagcgcaagcagatttcaccggactgccagcgaaatggcagccgattaatgattacggagccaaggtacaggcgcatgtcatcgacaaatattgaacaagtgatgccggttaagctggcgcaggcgctggcgaatccgttatttccggcgctggacagcgccttacgtagtggacgccatattggcctcgacgaactggataatcatgcattcctgatggattttcaggaatatctggaagagttttacgcgcgttataacgttgagcttattcgcgcaccagaagggttcttctatttacgcccacgttccaccacgctgatccctcgttccgtcttgagcgaactggatatgatggtcgggaaaatcctctgttatctctatctcagcccggaacggctggcgaatgaggggattttcacccagcaggaactgtacgacgaactgctcaccctggccgatgaagcaaaactgctgaaactggtgaacaaccgtagtaccggtagtgacgttgaccgtcagaagttgcaggagaaagtacgttctagcctcaaccgtctgcgtcgtttaggcatggtgtggtttatgggccacgacagcagcaagtttcgcattaccgaaagcgtgttccgcttcggagccgatgtgcgtgctggcgacgatccccgtgaagcacagcgtcgcctgattcgtgatggcgaagcaatgccgattgaaaatcatctgcaactcaacgatgaaaccgaagagaatcagccagatagcggagaggaagaataatgattgaacgcggtaaatttcgcagtctgacgctgattaactggaacggcttttttgcccgaacttttgaccttgacgagctggtcacgacgctttctggcggtaacggggcgggtaaatccaccaccatggcggcgttcgttacggcgctgatccccgacctgaccctgctgcatttccgtaacactacggaagccggggccaccagcggtagccgcgataaaggtctgcacggtaagctgaaagcgggtgtctgttatagcatgctcgacaccattaacagccgccaccagcgcgtggtggtcggtgtgcgtctgcaacaggttgccggacgcgatcgtaaagtggatatcaagccgtttgccattcagggactgccgatgagcgtgcagccgacacagctggtgaccgaaaccctgaacgaacgccaggcgcgcgtgctgccgcttaacgagctgaaagacaagctcgaggcgatggaaggcgtgcagtttaaacagttcaactccattactgattaccacagcctgatgttcgatctgggcatcatcgcgcgtcgtctgcgctccgcatctgaccgtagcaaattctatcgtctgatcgaagctagcctgtatggcgggatctccagtgccattacccgttctctgcgcgactacctgttgccagaaaacagcggcgtgcgtaaagcgttccaggacatggaagcggcgctgcgtgaaaaccgtatgacgctggaagcgattcgtgtcacccagagcgaccgcgacctgtttaagcatctgatcagcgaagccaccaactacgtggcggcggactacatgcgtcacgccaacgagcgccgtgtccatctcgacaaagccctggagtttcgtcgcgagctacatactagccgtcagcaactggcggctgagcagtacaaacacgtcgatatggcgcgtgagctggcagagcacaacggtgccgaaggcgatctggaagcggattatcaggcggccagtgatcacctgaacctggtgcaaaccgcactgcgtcagcaggagaagatcgaacgctacgaagcggatctcgatgagctgcagatccgtctggaagagcaaaatgaagtggtggcagaagccatcgaacgccagcaagagaatgaggctcgtgcggaagctgccgaactggaagtggacgagctgaaaagccagcttgctgactaccagcaggcgctggacgtccagcaaacgcgcgcgatccagtataaccaggcgattgctgcgcttaatcgtgccaaagaactgtgccatctgccggacttaaccgccgactgcgccgccgaatggctggaaaccttccaggcgaaagagctggaagcgactgaaaaaatgctctctcttgagcagaaaatgagcatggcgcaaaccgcgcacagccagtttgagcaggcttatcagctggtggtggcaatcaacggcccactggcgcgtaacgaggcgtgggatgtcgctcgcgaactattgcgcgaaggggtcgatcagcgtcacctggcagagcaggttcagccgctgcggatgcgattaagcgaactggaacagcgtctacgcgagcagcaagaagctgagcgtctgctggcagatttctgcaaacgtcagggcaagaattttgatatcgacgaactggaagccctgcatcaggaactggaagcacgcattgcctctctttccgatagcgtgtctaacgcccgtgaagagcgcatggcactgcgccaggagcaggaacagctgcagtctcgcattcagagtttgatgcagcgtgcgccggtttggctggcagcgcaaaacagtctcaaccagttgagcgaacagtgcggcgaagagtttacctccagccaggacgtcaccgaatatctgcaacagttgctggagcgtgagcgagaggcgattgttgaacgcgatgaagtgggcgcgcgcaaaaacgccgtcgatgaagagatcgaacgtttaagccagcctggcggctctgaagatcagcgtctgaacgcgctggcggagcgttttggtggtgtgctgctgagtgaaatttatgacgacgttagcctggaagatgcgccgtacttcagtgcgctgtatggcccgagtcgccacgccatcgtggtgccagatctgagtcaggtaactgaacacctggaaggcttgaccgattgcccggaagatctctatctgatcgaaggagatccgcagagtttcgatgacagcgtgttcagcgttgatgagctggaaaaagcggtagtggtgaaaatcgccgatcgtcagtggcgttatagtcgtttcccggaagtgccgctgtttggtcgtgctgcgcgtgaaagccgtattgaaagcctccatgccgagcgtgaagtgctttccgaacgcttcgccacgctctcctttgatgtacagaaaactcagcgtctgcatcaggcgttcagccgctttatcggcagtcatctggcggttgcgtttgagtctgacccggaagcagaaatccgtcaactgaacagccgtcgcgtcgaactggagcgggcgttaagtaatcatgaaaatgataaccagcagcagcgtattcagtttgagcaggcgaaagagggcgttacggcgctgaaccgcattctgccgcgtctcaacctgttggctgatgacagcctggcggatcgcgtcgatgaaatccgcgaacgtctggatgaagcccaggaagccgcgcgttttgttcagcagtttggcaatcaactggcgaaactggaaccgattgttagcgtattgcagagcgacccggaacagttcgaacagttaaaagaagattacgcgtactctcagcagatgcagcgcgatgcccgtcagcaggcgtttgccctgacggaagtggtgcagcgtcgtgcgcactttagctattctgacagcgcagaaatgcttagcggtaacagcgatctcaacgaaaaactgcgtgaacgtctggaacaggcggaagcggagcgtacccgcgctcgcgaagcgttgcgcggtcacgcagcgcagttgagtcagtacaaccaggtgctggctagcctgaaaagttcttacgacaccaaaaaagagctactcaacgatctgcaacgtgaattgcaggatatcggcgtgcgtgctgatagcggggcagaagagcgggcgcgtattcgccgtgacgagctgcatgcgcaactgagcaataaccgtagtcgccgcaatcaactggaaaaagcgcttaccttctgcgaagcggagatggacaacctgacccgcaaactgcgcaagctggagcgggattactttgagatgcgcgagcaggtagtgaccgccaaagcgggctggtgtgcggtgatgcgcatggtgaaagataacggcgttgagcgccgcttacaccgtcgtgagctggcttatctctccgctgatgatttgcgttccatgagcgataaggcgttaggtgcgctgcgtctggcggtggcggataacgaacatctgcgcgacgtgctgcgcatgagcgaagatccgaaacgtccggagcgtaaaattcagttcttcgtggcggtttatcagcatctgcgtgaacgtattcgtcaggatattattcgtaccgatgatccggtggaagctatcgaacagatggagattgaacttagccgtctgaccgaagaattaacctcccgtgaacagaaactggcgatcagttcccgcagcgtggcgaacatcattcgcaaaaccattcagcgcgagcagaaccgtatccgtatgctcaaccaggggttgcagaacgtaagctttggtcaggtgaacagcgtgcgtctcaacgtgaacgtgcgtgaaacgcacgccatgctactggatgtgctctctgaacagcacgagcagcatcaggatctgtttaacagcaaccgtttgaccttcagcgaagcgctggcgaaactgtatcaacgtcttaacccgcagattgatatggggcagcgcacgccgcagaccatcggtgaagaactgctggattaccgcaactatctggaaatggaagttgaggttaaccgtggttccgatggctggctgcgcgcagagtctggtgcattgagcaccggtgaggcgattggtaccggtatgagcattctggtgatggtggtacaaagctgggaagatgaatctcgccgcctgcgcggtaaagatatctctccttgccgcctgctgttcctcgatgaagcagcgcgactggatgctcgttctatcgccacgctgtttgaattgtgtgagcgtttgcaaatgcaactcatcatcgcagcgccggaaaatatcagcccggagaaaggcaccacctataaactggtgcgtaaagtcttccagaataccgaacacgttcatgtcgtcggcctgcgaggatttgcgccgcaactccctgaaacgcttccaggaactgacgaagcgccttctcaggcgagttaaaattaaggcggcagcaatgccgccttttctttttccgaaaactccgtttctgcactaaaaaagtggcacattacggcgcgcttttctttaaacttctttacattaggttatgtaaaaacgtatcggcgtttatatactgaagataagcctgatgagtaacaggcttgctcgtcatactttcgtgagtattggcgttgtacaggcaagtcgtaaaataacagcctggctattcagagtatgataaaaacagggggcaagggatgttgcttaatatgatgtgtggtcgtcagctgagcgcaatcagtttgtgcctggccgtaacattcgctccactgttcaatgcgcaggccgatgagcctgaagtaatccctggcgacagcccggtggctgtcagtgaacagggcgaggcactgccgcaggcgcaagccacggcaataatggcggggatccagccattgcctgaaggtgcggcagaaaaagcccgcacgcaaatcgaatctcaattacccgcaggttacaagccggtttatcttaaccagcttcaactgttgtatgccgcacgcgatatgcaacccatgtgggaaaaccgtgatgctgttaaagccttccagcaacagctggcagaggtggcgattgccggtttccagccgcagtttaataaatgggtagagttactgaccgatcctggtgttaacgggatggcacgcgacgtggtgctctctgatgcgatgatgggctatctccatttcattgcaaatattccggtcaaaggcactcgctggctatatagcagtaaaccttatgcacttgcaacgccgccgctcagcgtgattaaccaatggcagctggcgctggataaaggtcaattgcctacgtttgttgcaggactggcaccgcagcatccgcaatatgcggcgatgcatgaaagcttactggccttactctgtgacaccaaaccgtggccccaactgaccggcaaagcaacgttgcgcccagggcagtggagtaacgacgtaccggcgttgcgcgaaatattgcaacgcacaggcatgttggacggggggccgaaaattactctacctggcgatgacacgccaactgacgcggtagtcagcccatccgctgttactgttgaaacagcagaaactaagccgatggataagcaaacgacgtctcgtagtaaacctgcgcctgccgttcgcgccgcctacgataatgaactggtggaagccgttaaacgttttcaggcatggcaaggattgggggcagatggtgctattggcccggcaacacgtgactggttaaacgtaacgcccgcccagcgtgctggtgtgttggctctcaacatccagcgattgcgcttgctgccaacagagctttctaccgggatcatggttaacattccggcctatagcctggtctactatcagaacggcaatcaggtgctggatagccgagtcattgtcggtcgccccgatcgcaaaacgccgatgatgagcagtgcccttaacaacgtagtggtaaacccgccgtggaacgtacctccaactctggcacgcaaagatattctgccaaaagtgcgcaacgatccgggatatctcgaaagccatggctatacggtgatgcgcggctggaacagcagagaagcgattgacccatggcaggttgactggtctacaatcacggccagcaatttaccgttccgcttccagcaggctccaggcccacggaacagcctggggcgctataaattcaatatgccgagtagtgaggccatttatttgcatgacacgccgaaccacaatctgttcaagcgtgatacacgcgcattgagcagtggctgtgtacgagtgaataaagcttccgatctggcgaatatgctgttgcaggatgcaggctggaatgacaaacgtatttctgatgcgctgaagcagggtgatacacgttacgtcaatattcggcagagcattccggtgaatctctactacctgacggcctttgttggtgcagatggtcgtacccagtatcgtacagatatttacaattatgatctgcctgcgcgatccagcagccaaatcgtaagcaaagcggaacaattaatcaggtaaatgaagtagttcggggaaatcagttgtcgtaataattagcatgattgggggcgattctctgcagcccccgtcactgctggggttgagtcatcttgacgtctgctttacgggcggttaaggtgcctcttgtgcgccagaagtgcatataaacgataacattgacctgtagacttgattatcatggacaaattcgacgctaatcgccgcaaattgctggcgcttggtggcgttgcactcggtgccgccatcctgccgacccctgcgtttgcaacactctctaccccacgcccgcgcattttgacactcaataatcttcataccggagagagtatcaaagcggagtttttcgatggcagaggctatattcaggaagaattggcaaaacttaaccattttttccgcgattaccgcgcgaacaaaataaagtccatcgacccaggattattcgaccagttgtatcgcctgcaagggttgttaggcacgcgcaaaccggtgcaactcatttccggttatcgttctattgataccaacaatgaactacgcgcccgcagccgtggagtagcgaagaaaagctatcacactaaaggccaggcgatggatttccatattgaaggtatcgcgttaagcaatattcgcaaagccgcgttatctatgcgcgcaggtggtgtaggatattatccacgtagtaactttgtgcatattgataccgggccagcacggcactggtaataattgcttaacgaaacaggggcagtatgaactatcgtattattccggtcaccgcattctcccagaactgtagtttaatctggtgtgaacaaacccgtctggccgcactggtcgatcctggcggcgatgcggaaaaaatcaaacaggaagttgatgacagcggcctgacactgatgcagatcctgctgacgcatggtcatctggaccacgttggcgcagcggcggaactggcgcaacattacggcgtgccggttttcggcccggaaaaagaagatgagttctggctgcaaggcttgcctgcgcaaagtcgtatgtttggtctggaagagtgccagccgctgacgccagatcgttggctgaacgaaggcgataccatcagcatagggaatgtgactttacaggtgttacattgccctgggcatacgccgggtcatgtcgtgttttttgatgatcgggcaaagctgctgatttctggcgatgttattttcaaaggcggagtagggcgcagtgacttcccgcgtggcgatcataatcaactgatttctagtatcaaagataaattgctgccactgggggatgacgtgatatttattccgggtcacggaccattatccacacttggttatgaacgcctgcataatcccttcctgcaagacgaaatgcccgtctggtaaggcacataaaaaagcccgcttttaatgctggcctggatttctggcaaagtgcgctttgtttatgccggatgcggcacgagcgccttatccggcctacaaaatcgtgcaaattcaaaatattgcaggggacgcgtaggcctgataagcgtagcgcatcaggcaatgttgcgtttgtcatcagtctcagcccgcttttcagcgggcttcattgtttttaatgcttacagcactgccacaatcgcttcgcacagcggagccatgttatctggtgtcatcccggccacatttacgcgaccagaagcaaccgcatatacgccaaactcttcgcgcagacgcagcacttgttcttttgtcaggccactgaaggagaacatgccgttctgtttgatgataaagctgaagtcgcggtttgcgcctttttcctgcagcgtattgacgaacaactgacgcatacgctgaatacgctggcgcatatcagtcagctcttgttcccaaatcgcacgtaacgcatcgttgctcaggatggtggcaacaacagaagcgccgtgtgctggtgggttagagtagttagcgcgaatcgccgctttcatttggctgaatgcgcgatcaacggtttcactgtcggcagcaaccagagtacaagcgccaacacgctcgttgtacaggccaaagtttttagagtaggaactggcaacaatcagctctttatgcatagccgcgaaagcgcgcagtccttcagcatcttcttccagaccacgggcaaaaccctggtaagcgaagtcaaacagcggtaaccagcctttctcaacggagagttgtgccagtgtttgccattgttccagcgtagggtcgataccggttgggttatggcagcagccatggaacagcactacgtcgccagcctgagcttcattcaggctgttaatcagtgcatcgaagtcaagagtgtgattttccgcatcataataagcgtattcacgaacttccagacctgcagagttaaagacgctcttatggttcggccagcttgggttgctcacccacacacgcttaacgctggtattttttgccaggaaatcggcagccacgcgtagtgcgccagtgccccccggagtctgtgccgtgcgagcacgtttgtcattgatcagggcgctacctttaccaaacagcagttcctgagtgcagcgaccaaattcagggatgccgtcaatgccgaggtaatttttggtggtttcattttcgagcagatactgttcagcctttttcacgctggtcagtaccggggttttgcccgtctcatctttatagacaccaatcccgaggttaattttgccgggacgttcatcggcacgaaacagatcggccaggcccagaatcgggtcggcaggagcggcggtaatgttctcaaacatgacgaggttccattatggttacagaagggaagtccgctatcagggtaacgggagatttacaaaattccaactattactgatgaaaacgcaggctgtttttgcaagacgtgagattgctctggaaggtataaaaaaaacaggaccaaagtcctgttttttcggcatttaacaaagaggtgtgctattagaactggtaaacgatacccacagcaacggtgtcgtcactacctacgcccagtttgttgtcagaatcgatctggttgatgatgtagtcaacataggtggacatgtttttgttgaagtagtaggttgcgcccacttcaaagtagttcaccagatcaacatcaccgataccttctacgtctttcgctttagatttggtgtaagcgatggacggacgcagaccgaaatcgaactggtattgcgcaactaacagaacgtcttgcgttttgttggcgaagccgctggtgtttgtaaatttattagtgatcggcgtagcgttacgggtttcaccgtagttcgctgccaggtagatgttgttcgcgtcgtacttcagaccagtagcccactgttcagcttttttaccgttgccaagaggttgagcttcttgcaggttggtacggtcagctgcaccataagcaccaacgataccaaagccttcgtattcgtagctgatagaaccgccaacaccgtcgccgttagaacggcgtgcagtgtcacgctcgtttttacccaggtactgaacagcgaagttcaggccatcaaccagaccaaagaagttggagttacgataggtagcaacgccgccaacacgaccaacgaagaagtcatcgctgtatgcagtatcaccaccaaattctggcagcatatcggtgtaacccagtgcatcataaaccacaccgtagttacggccgtaatcgaaagaaccaacgtcagcgtatttaagacccgcgaatgccagacgcgttttgttaccagtttgagcgtcagcgccttcagagttgttaccctggaagttatattcccactgaccataaccggtcagatcggaattgatttgagtttcccctttaaaaccaagacgggcataggtcatgtcgccattgccaccgtaactgttttcaccgttacccttggaaaaataatgcagaccaacagctttaccgtacagatctactttgttgccatctttgttatagatttctgcagcgtttgcagtacctgctactaacagagcagggacgatcactgccagaatattgcgcttcatcattatttattaccctcatggttttttttatgacacctgccactgccgtcaataagttctgtcaataaaaatttacggaactattgatgagagtttggtgtctttatgtgtctgcaggcatctttccattcaaactaacgtttcgctaccgtgaaagtgctacaaagataaagatttggtttcaaaaagaaaaaatatgtaaccaaaagtaaaatttaaggaactttgtgaacaccgtcatatttccatagagacgtgatgatatttacagcaattttaatctatttatatgatttccttatatttaaattaactaaacggaaattttgtttctgatggaaactttatcgacctggcacaaaatcttctttcagacatccagaatgccaaaaaatagtatgaaaattgtgctattagctaagaaaaaactaatccgcaataagaatgcggattagtttttgcgcgtaaatgttgcaatgtaatattccgtaacaggatgatcgttatggcggggttgcaaatagattgcttgacttaacaaacagataacttgacagaaaagataaaaaaagagccagcgggcgctggctcttgaagacgctaaattagaagctggcgttacgcggagtacgtgggaacggaatcacatcacgtacgttttgcacgccagttacgtaagcaatcagacgttcaaaaccaagaccgaaaccactatgcggaacagtaccgtagcgacgcagatcgcgataccaccagtaatcttctttattcaggcccatttccagcatacgctcgtccagcacgtccagacgttcttcacgctgggagccaccaatgatctcaccgatgcccggagccagaacgtccatagccgcaacggttttaccgtcttcgttaaggcgcatatagaacgctttaatatctttcggatagtttttaaccactaccggtgctttaaagtgttcttccgccagataacgctcatgctcagaagagagatcgactccccagtaaaccgggttttcaaacttcctgccgcagttttcgagaatggtcactgcgtcggtataatccacctgcgcaaaatcggcttcaatgaagcgttccagacgactaacggcatctttatctacgcgttcagcgaagaatttcatgtcgtcagcgcgttcttcgagaaccgctttgaagacatatttcagcatggcttcagccagacccgcaatatcgttcaggttagcaaacgccacttccggctccagcatccagaattccgccaggtgacggctggtgttggagttttcagcacggaaagtcgggccgaaggtataaattttggacaatgcgcaagcgtaggtttcgccgttcaactggccagatacggtcaggaaagactctttaccaaagaagtctttgtcgaaatccactttgccctgatcgttacgcggcaggttttccagatccagcgtagaaacgcggaacatttcgcctgcaccttcggtatcagatgcggtaatcagactcgtactaacccagaagaatccctgctcgttaaagaagcgatgcagcgcctgcgccagcgtatggcgaacgcgcgcgacggcaccaatcaggtttgtgcgcggacgcaggtgagcgacttcacgcagatactcaatgctgtggcgttttgccgccatcgggtaagtgtctggatcttcaacccaaccagcaacttcaaccttgctggcctgaatttcaaattgttgcccctggcccgggctcgccacgactttacccgtcacaatgacgctgcagccggtggtcagacgcaggacgtcttcattgtaattgggcagagaattattgatgacagcctgtacaggatcaaagcaggaaccgtcataaacggcgaggaaggagatgccagctttactatctcggcgggtacgtacccatccgcgcacggtgacttcgctgtcaacggctacacggccctggagtacgtcggctacaggcacaacgctcataatattctctctgttaatagtcggaaaaaataaacacttgtccacccgtaaatggggggatacctatgttacctggcatctgcaatcagacaagcagaattcgcaaatgcagcgaaagatttcggaattaaaggtaaaaaaagggagccgattagctccctgatgatattaactggcttttttaatatgcggaaggtcgaacgctttgcgcagcgcccgaacaaacgctttatcatggcagatagttttgccagggctgtcagaaagtttcgccaccggtttaccgttacactctaccaacttaatgacaatattcaggggttttacctgggggatatcgcaggtcaggcgagtcccaataccaaaacttaattgcacgcgggaagagaagtggcggtatagctcaaccgctttgcgtaaatccagattgtcagagaaaaccagcgttttactctgtggatcaattcccagcttttcataatgtgcaatggctttttcaccccattcaaccgggtcgccagagtcatgacgcaggccctgataccgactagcgaactcgacaccgaaatcacgcaggaaagcatccatagtgatgcagtcggttaatgcaatgccaagttggtcgggatactcttccagccaggcagcaagtgcagctcgctggctgttggctagatccgggctgatttgctgatgtgcctggaaccattcgtgtgcctgtgttcccatcggcgtgagggaaagccgacgcgccagatcgtagttgctggtgcccacaaaccaggattcctgttgcagacgcttaacgatggtttcttgtacttcgcgagaaaaacggcgacgggtgccaaaatccatcagatggaagcggctcatatcaagaccggcggttaacgcgctgaagtcgactaatttgctttccagcgtgtcgagggcttgcgcaacgtcggcctgcggactgcgatagcgatgtaccatttcactgataaccgccagcaaaggaacttcccagaggatgacttcacgccacgggccgcttaaacgaatatccagcttgccattatcgttggacacggtgacttgttccgggttaaagcggaactcgcgtaaccagttaagatagtcggccttaaagaaaggcagggcagaaagccactgatattcatcatcctgcaggcgcaggtgctgcatcgcctgaacctgttcacgaatagcatcggcataaatacccagcagatcgtcacctcggcaacgaaactccgccgcgacatgcacatcgtaatagtgatgaaacacggcttgctgcatatgcaacttataagcatctgtatccagcaagctgtgcagaacaggagaagcgaattgtgtcataggtgcgcagtagcgtcctcgtacaggagcgtttagtacaataaacatcttcaggaactgctggagtataccttgtttcgcaatttattgaaccccgatcacaccatatgccacctttctggtcgatggcattacgcggtgtatgttataaaaatgtagcaataaaggcgtttgtacctgaaaagatgaagattctgcatagcgcgatttacgcaacaggaatagactgaacaccagactctataaaagatgctaaaggttatttatgactcaacagccacaagccaaataccgtcacgattatcgtgcgccggattaccagattactgatattgacttgacctttgacctcgacgcgcaaaagacggtcgttaccgcggtcagccaggctgtccgtcatggtgcaagtgatgctccccttcgtctcaacggcgaagacctcaaactggtttctgttcatattaatgatgagccgtggaccgcctggaaagaagaagagggcgcactggttatcagtaatttgccggagcgttttacgcttaagatcattaatgaaataagcccggcggcgaataccgcgctggaagggctttatcagagtggcgatgcgctttgcacccagtgtgaagccgaaggtttccgccatattacgtattatctcgaccgcccggacgtgctggcgcgttttaccaccaaaattattgccgataaaatcaaatatcccttcctgctttccaatggtaaccgcgttgcgcaaggcgaactggaaaacggacgccattgggtacagtggcaggacccgttcccgaaaccgtgctacctgtttgcgctggtggcaggcgactttgatgtactgcgcgatacctttaccacgcgttctggtcgcgaagtagcactggagctgtacgtcgatcgcggcaaccttgatcgcgcgccgtgggcgatgaccagcctgaaaaactccatgaaatgggatgaagaacgctttggcctggagtatgacctcgacatctatatgatcgtcgcggtggatttcttcaatatgggcgcaatggagaataaggggctgaatatctttaactccaaatatgtgctggcccgcaccgacaccgccaccgacaaagattacctcgatattgaacgcgttatcggccatgaatatttccataactggaccggtaaccgagtgacctgtcgcgactggttccagctcagcctgaaagaaggtttaaccgtcttccgcgatcaggagttcagctctgaccttggttcccgcgcagttaaccgcatcaataatgtacgcaccatgcgcggattgcagtttgcagaagacgccagcccgatggcgcacccgatccgcccggatatggtcattgagatgaacaacttctacaccctgaccgtttacgagaagggcgcggaagtgattcgcatgatccacaccctgcttggcgaagaaaacttccagaaagggatgcagctttatttcgagcgtcatgatggtagtgcagcgacctgtgacgactttgtgcaggcgatggaagatgcgagcaatgtcgatctctcccatttccgccgttggtacagccagtccggtacaccgattgtgaccgtcaaagacgactacaatccggaaaccgagcagtacaccctgaccatcagccagcgcacgccagccacgccggatcaggcagaaaaacagccgctgcatattccgtttgccatcgaactgtatgataacgaaggcaaagtgatcccgttgcagaaaggcggtcatccggtgaattccgtgctgaacgtcactcaggcggaacagacctttgtctttgataatgtctacttccagccggtgcctgcgctgctgtgcgaattctctgcgccagtgaaactggaatataagtggagcgatcagcaactgaccttcctgatgcgtcatgcgcgtaatgatttctcccgctgggatgcggcgcaaagtttgctggcaacctacatcaagctgaacgtcgcgcgtcatcagcaaggtcagccgctgtctctgccggtgcatgtggctgatgctttccgcgcggtactgcttgatgagaagattgatccagcgctggcggcagaaatcctgacgctgccttctgtcaatgaaatggctgaattgttcgatatcatcgacccgattgctattgccgaagtacgcgaagcactcactcgtactctggcgactgaactggcggatgagctactggctatttacaacgcgaattaccagagcgagtaccgtgttgagcatgaagatattgcaaaacgcactctgcgtaatgcctgcctgcgtttcctcgcttttggtgaaacgcatctggctgatgtgctggtgagcaagcagttccacgaagcaaacaatatgactgatgcgctggcggcgctttctgcggcggttgccgcacagctgccttgccgtgacgcgctgatgcaggagtacgacgacaagtggcatcagaacggtctggtgatggataaatggtttatcctgcaagccaccagcccggcggcgaatgtgctggagacggtgcgcggcctgttgcagcatcgcagttttaccatgagcaacccgaaccgtattcgtagcttgattggcgcgtttgcgggcagcaatccggcagcgttccatgccgaagatggcagcggttacctgttcctggtggaaatgcttaccgacctcaacagccgtaacccgcaggtggctagtcgtctgattgaaccgctgattcgcctgaaacgttacgatgccaaacgtcaggagaaaatgcgcgcggcgctggaacagttgaaagggctggaaaatctctctggcgatctgtacgagaagataactaaagcactggcttgataaataaccgaatggcggcaatagcgccgccattcggggaatttacccctgttttctcaggcgagtttcagattcaccacgttgcatcacccgttgcaacacctccgcttccagctccgctaatcgcacgctccctaatcgacgcggacgggggatatccactgtcaaatccagaccaatttttccctcttcaattaacagcacccggtcagccatcgctaccgcttcgctcacatcatgcgtcaccaacagtacggtaaagccgtgctcctgccaaagactcacaatcaaatcctgcatctcgagtcgcgttaaggcgtccagcgccccgagcggttcatcaagcaacaataatcccggtcgatgaatcaacgctcttgccagcgccactcgctgtttctgcccgccagaaagtgcggcaggccattcccctgcgcgattctccagtcctaccgcagccaacgctcgacgtgcggcatcgcgccactggcctttaaggcctaacccaacgttatcaatcacgcttttccacggtagcagacgcgcatcctgaaacatcattcgcgtgtcttcctgaatttcagccagcggtgtggtgcccgctaacacatcgcctgcggttggcgtttccagacctgccagcaggcgcagcagggtacttttgccaccaccgctgcggcccaccaccgccacaaactgacctgccggaatatgtaaatccagttggttcaggacgatattttccgcgtaatgtttgcttactgcattgagcaacaatggcgtgccctggttcagacgagcagtattcataccgtggcctccttcaaatgataagccgggttccagcgcaaccagaggcgctctaacagctgcgcgctgacgtcagccagtttgccgagcagggcgtaaagaataatagcgactaccaccacgtccgtttgcaaaaacccccgcgcattcatcgccagataaccaatgccactattggcagaaatggtttcggcaacaatcagcgtcagccacatcaggcccaacgcaaaacgcacgccgaccataatactgggcagggcaccaggcaggatcacatggataaacagcggtatgccggataatccatagctacgcgccatctccaccaacccgcgatcgatattacggatgccatgccaggtgttgatataaatggggaatagcgtaccgagcgccaccagaaagatttttgcggattcatcaatgccaaaccacaaaatcaccagcgggatcagcgccagatgcggcacgttgcgcaacatctgaatactggtatccagcagccgttctccccagcgagatagcccgctaatcagtcccaaaatcaaccccaggcttccgccaatactaaagccaatcagcgcccgccaggagctgatcgccagatgctgccacagttcgccgctggcggagagcgtccagaacgccgtcaccactccttccggactaggcaaaatacgcgtgctcagccagccaacgctggaggccagttgccacaccgccacgatgcccaccggtaaaaaccagggggcaacgcgcaataaccacttcttcactggcgttgccattatttcttccttagctttgcgcgactttacgggggataaaatcattcgccaccgcttcgccttgcggattcagcggctgcggctggggaatttccgggatggcgacatccagaagcgggaacagcaactcgccaacccgatacgcttcttccagatgcggatagccgctaagcacaaaactgtcgatgccaagcgcggcatattcgttgattcgcgcagcgaccgtaggaccatcgcccaccagcgccgtcccggcaccgccgcgcactaagccaacgcccgcccataaattggggctgatctccagattgtcgcgcttgccgttatgtaacgccgccattcgctgttgccctacggaatccgtccgggcgaatgcggcctgtgctttggcgatagtttcatcatcaagatggctgattaaccgctcggcggcctgccacgcttcgtcgttagtttcacgaacaatcacatgcagacgaataccgaaacgaattttgcgtccatgcgcggcagctttcgcccgcacttgttcgattttctctttaaccagttccggcggttcgccccaggtgaggtagagatcaacctgttctgccgccagctcctgggcgacatcactgcttccgccaaagtaaagtggcggatacggctgttgaatcgccgggaagagcagttttgctccgcgcacatgaatatgtttaccgttgaaatcgacggtttctctctgcaataaacgccgccagacctgggtaaattccgcgctggcttcgtagcgctcgctatgatcaaggaacactccgtcgcctgccagctcttgtggatcgctgcctgtgaccaggttaaacaacgcacgtccattactgagacggtcaagcgtggcggcctggcgggcggcaacggtaggactggttacgctgggacgcagggcgacaagaaacttcagccgctgcgtcaccgggatcatgcttgcggcaaccagccacgcatcttcgcaggagcgccccgttggaattagcacaccggtatagccaagacgatccgccgcttgcgcaatttgttgcagataaccgtgatcaaccgggcgactaccttcttccgttcccagataatgcccgtcaccgtgggtcggtaaaaaccagaacatattcagactcataattgttttccttccagttgagtgggctgccagatgcgctggcgaatatcgacttttttcggcaccagacgattttcataaaacagatctgccgtttgctgctgtaaggcggcaacctcggcgttaaccggtttgatggtggtaggagggcgatgatctaagtaagaggcaatcaccggtgccggtaagcccatcgtttttgccagtaaagcgatgctttgctcgcgctggctgcgggttaacgcatcggcctcactaaaggttgccagtacgccctgaataaaagcgccgtttttttctgcatagggacgagctgccagataaaagcttccagtttgattgagatcggtgccgtctttcagcacccgcacgccgccctgtaataatgcagcagagtagtagggatcccagatagcccaggcgtcaacgttaccttgctggaacgcggcgcgggcatcagcgggcgtcaggtaagtgggttggatatcggtaaacttaagtccggcctgacgcagtgcacgcagtaaaaggttgtgactactggaacctttctgaaaggcaactttgtgacctttaagatcggctacggttttgatcgggctgttttctgccaccagaatcacttcggctttgggcttcggtggctcgacgcccacgtacaccaaatcagccccggcagcctgggcaaagattggcggaatatccccggtactgccgagatcaatactgccaacgtttaacgcttccaacatttgcggacccgcggggaactccacccaggagattttactttccggatagcgtttttccagtaactggtggctttttgccagcaccataccaatactgcctttctgatagcctatacgtaacgcttcagggctggattctgcagcaaccgcaaaagtagagacgctaagcaatcccgccagcgccagtttaatgatgttacgcatgggcattacctcgcagagacagaaggtcaggaacctgaacatcgcggcggtgcaatgcctgccagaaagtttctagcgcggtatcaagacgggtttgcagatttggcgtgaactggggtctgtgatggtaatcaattacttgactgtcatcggcaaacacgccgtgcaggatctcctgagctttcagtgcgcttaaaactggtttaagggcataatcgaccgccagcagatgggccacggtaccgcccgtcgccagcggtagcaccactttgccttgcaaagcgcgttctggcagcaggtcgagcagggttttcaacgcaccggaataggcggctttatacacaggcgtggcgacaatcagcccatcggcctgttgcagctgttcggtgaaggtcttgagtgccggactatcgaaacgagcataaagtagatcttccggggcgaagttttgcagattccagtgataaacctctacatccaggccatttagtttttcccgcgcatattccagcaaggagctggagcgagaaggaaagcgaggactacccgccagggtgatgacacgcatactctctccttataaccaattgttctttttttgttaacattgataacaattcggtcagtctgtcggagagacaagaaaattccaaatataaattttgtgtatctttttctgaaaataaactaaagaaagggctttatatatcacgcatatttatttattggatagtcattagatgttgaatcaatgaattactcgttcagttaatatttaaatattcatgaaatctataaattaaagatttgtcacttattggatttagtatgcttgatttaaatggcggacaattattgttattattaagtctaatgtcatttaaaggcattatcatatttacgaagagatcaggatgataacgatgaaaaaaagtgtattgacggcgtttataactgtggtatgtgcaacgtccagcgttatggctgctgatgataatgctatcacggatggcagtgtaacatttaatggtaaagttattgctccagcttgtaccctggtagctgcgacgaaagattccgtggtgactttgccagatgttagtgccacgaagttgcaaaccaatggtcaggtttctggcgtgcaaattgatgtgccaattgaattaaaagattgtgatactaccgtaacaaaaaatgcaacgttcacctttaatggcactgcggatactactcagattacagcgtttgctaaccaggccagttctgatgctgctacaaacgtggccctgcaaatgtatatgaatgatggtacaacggccatcacgccagacacagaaaccgggaacattttgttgcaggatggagatcagacgttgacttttaaagttgattatatcgctacggggaaagcgactagtggtaatgtgaatgcggtaacaaatttccatattaactattattaatagaactcattaattgttttattaattagtacccctccagtgttctggaggggatattcatattttttaagagtgactatttatgaaaacttgcataacaaagggaattgtgaccgtaagtttaacggcaatattactcagctgcagttccgcatgggcggcaggtaaaggcgggattggacttgcagcaacacgtcttgtttatagtgaaggtgaagagcaaattagtctgggtgtacgtaacaccagtccggatgttccttatcttattcagagttgggtgatgaccccagataataaaaaaagtgcagactttattattacaccaccgctatttgtgctgaatccggcaaatgagaatctgttacgcattatgtacattggagcgccgttggcgaaagacagagaaacccttttcttcactagcgtacgggcagtccctagtacaacgaagcggaaagagggaaataccctgaagattgccacacaaagcgtcatcaaacttttctggcgaccaaaaggtttagcgtatcccttaggcgaggctccggcgaaactgcgttgcactagcagtgctgacatggttacggtcagtaacccaacaccttatttcattaccctgacagacctgaaaataggtggaaaagtagttaaaaatcaaatgatttccccctttgataaataccaattttctctgccaaagggggccaaaaatagcagcgtaacgtatcgaaccatcaatgactacggggcggaaacgccgcaactcaactgtaaaagctaagccgtcttcagttaagagagcgagatgtatagaactcatcgacaacacagcctgttaagctctggtggagtgccaagctttattggtgggctggtggtgtttgtgagcgcagcgttcaatgcacaagctgaaacctggttcgatcctgcttttttcaaagatgatcccagtatggtggccgatttgtctcgtttcgaaaaaggacaaaaaataacgccaggggtttatcgtgtcgatattgttctgaatcagacaattgtagatacgcgcaacgtcaattttgttgagataacgccagagaaggggattgccgcctgtttgacgactgaaagcctggatgcaatgggtgttaatactgatgcgtttccggcttttaaacaactggacaaacaagcgtgtgtgccattggcggagattattccggatgccagcgtaacgtttaatgtgaataaactccgtctggaaattagtgtaccgcaaatcgccatcaaaagtaatgcccgtggttatgtcccccctgaacgttgggatgaagggatcaacgcgctattactgggatatagctttagcggggctaacagtattcatagcagcgcagacagtgattctggcgacagctattttctgaatttaaacagtggcgttaatttaggcccatggagattgcgcaacaatagtacatggagtcgtagtagtggccaaaccgcagaatggaagaatctcagcagctatttgcaacgggcggttattcctctgaaaggcgaactgaccgtaggtgatgattatactgcaggcgattttttcgatagtgtcagctttcgtggtgtgcagctggcgagtgatgacaacatgctgccagacagcctgaaagggtttgcgcctgtggtgcgtggtatcgccaaaagcaatgcccagataacgattaagcaaaatggttacaccatttaccaaacttatgtaagccctggtgcttttgaaattagtgatctctattccacgagcagcagcggtgatttgttagttgaaatcaaagaagcggacggcagcgtcaatagctacagcgtaccgttctccagtgtgccattactccagcgtcaggggcgaatcaaatacgcggtgacactggcgaaatacagaaccaatagtaatgaacagcaggagagcaaatttgcccaggccacgttgcagtggggcggaccgtggggaacgacctggtatggtggtggacaatatgctgaatattaccgtgccgccatgtttggtctgggatttaacctcggcgatttcggagcaattagcttcgatgcgacccaggcgaagagtacgctagcagatcaaagcgaacataaaggtcagagttatcgttttctgtatgccaaaacgctcaaccacttgggcactaactttcaattgatgggctatcgctatagcacgagcggtttctacaccctttccgacaccatgtataaacatatggatggctacgaatttaatgacggtgatgatgaagatacgccgatgtggagccgttattacaatttgttttacaccaaacgtggcaaactgcaggtcaatatctcccagcaattaggcgagtacggtagcttttatttaagtggtagccagcaaacttactggcatacggatcaacaggatcggctattacagtttggctacaacacgcaaattaaagatcttagcctggggatttcctggaactacagtaagtcccgtggtcaacctgatgctgatcaggtgtttgctctaaatttttccctgccgctcaatctgttgctccccagaagtaatgatagctataccaggaaaaaaaattacgcctggatgacctctaacaccagtatcgataacgaagggcacactacacaaaacctgggtttaacggagacattactcgatgacggtaacctgagctacagcgtgcaacagggatataacagcgaggggaaaacggctaatggtagcgccagcatggattacaaaggggcgtttgcggatgcccgagtgggctacaactacagcgataacggcagtcaacaacaactgaactacgctcttagtggcagtttagttgcccatagtcagggcattaccctggggcaaagcctgggggaaactaacgttctgattgcagcaccaggcgcagagaatactcgtgtggcgaacagcaccgggctgaaaactgactggcgcggatataccgttgttccttatgccacttcttatcgggaaaatcgaatcgcacttgatgcggcgagcttaaaacgtaacgtggatcttgaaaatgcagtagtcaacgtggttcccaccaaaggggcgttggttctggcggagttcaatgcccatgcgggtgcaagggtattaatgaaaacaagtaagcagggtataccgctgcgttttggcgcgatagcgacgctggacggcgtacaggctaatagcggcataattgatgatgatggcagcctctatatggcgggtttaccggcgaagggaacaataagcgtgcgctggggcgaagctcccgatcaaatttgtcatatcaattacgagcttaccgaacaacaaattaactctgcgattacgcgaatggatgccatatgcagataatctttggagaaaaatgcgtgagtttactacgactattttttgccgccgtcttaatgttatggtgcgctcaaaccgctgcttatagcgggcagtgtcatactactcaggggaatccgtatattggcgtcaattttggcgttaaaaccctggaggaagaagcaaatacggcaggggtagttaaagacaaattttatcagtggaacgaaagcaatgattattatgtttcctgtgattgcgataaagacaatgtcagaagtggccgatgggcattcgccgcggatagtccgttagtctatttaggcgacaactggtacaaaattaatgactatcttgccgccaaagttttattgcaggttaaaggcagttctcctactgcggttcctttcgaaaacgtgggcacagggggggatacccgatggcatatttgcgaccctggcggtcaacgtttaggtgggcagggggcaagcggtaatagcggtagcttttccctgaaaatattgcagccgttcgttggcagcgtcgtcattcctcctatggcgctggcgcgattatatgaatgctacaacatacccgcaggtgattcctgcacgactacaggtacaccggttttagtgtattacctgtctggtacgatcaatagtcttggcagttgttccgtcaatgccggagagacaattgaagttgatttaggtgatgtcttcgctgccaatttccgtgttgtagggcataaacctcttggggccagaacggcagaacttgcaattccagtcaggtgtaacacgggaaacgcgggattagttaatgtcaacctgagtctgacggcaaccacagaccccagctatccccaggcgattaagacgagtcgtcctggcgtgggcgtggtggtgaccgatagccagaacaacattatttcccctgctggtggaacattaccgctctctattcctgatgatgcagacagtatcgcgcgaatgaatgtctatccagtcagcacgacaggtgtaccaccagaaaccgggcgatttgaagccacggcaacggtgagaataaattttgattaacgcgtgaacgtatgaagaaaaaaacgatatttcagtgcgttatcttgttctttagcattcttaacatccatgtcgggatggctgggcctgaacaagttagtatgcatatttatgggaatgtggtcgatcagggctgtgatgtcgccaccaaaagtgcattacaaaatattcatattggtgattttaatatcagtgattttcaggccgcgaataccgtaagcactgctgctgatttgaatatcgatatcaccggttgtgccgctggtattactggcgcggacgtcctttttagcggcgaggctgacacccttgcgccgacactgctcaaactaactgacacaggcggaagcggtggtatggcaacggggattgccgtgcaaattcttgatgcgcaaagtcagcaagaaatcccgctcaatcaggtccagcctcttacgcccttaaaagccggggataacacactcaaatatcaacttcgttataagtccacaaaggcgggagcaacgggcggtaatgcgacggcggttctctattttgatctggtttaccagtgaaggagtgatgttgaaacggataatctggattctgttcttattgggattaacgtggggctgtgagctatttgcccatgatggcacggtcaacattagcggaagctttcgccgtaatacatgcgtgctggcacaggatagcaagcaaatcaatgtgcagttaggcgatgtcagcctgacacgtttttctcatgggaattatggcccggagaaatctttcatcattaatttgcaggattgcggaacagatgtcagcacggttgacgtcacctttagtggaacccccgacggagtgcagagcgaaatgttgtccattgaaagtggtacggatgcagccagcgggctggcaattgcgattctggatgatgcgaagatattgattccgcttaaccaggcgagtaaagactacagcctacatagcggtaaggtgccattaactttttatgcgcaattgcgacctgtcaatagcgatgtgcagagcggtaaagtgaatgccagcgcgacatttgtacttcattatgactaatacgtggaacagattggcgctcttgattttcgccgttttaagcctgctggtggcgggtgaattgcaggcaggagtggtggtcggcggaacgcgatttatctttccggcagacagagaaagcatatctattttactgactaataccagtcaggaatcctggcttattaacagtaaaatcaaccgcccaacgcgttgggccgggggggaagcgagcacagtgccagcaccattactggccgctccgccacttattctcctgaagcccggtacgacaggcacgttgcgcttgctgagaacggaaagcgacatcttgcctgtggatcgcgaaacgctatttgagttaagcattgccagcgtgccatccggcaaagttgaaaatcagagcgtaaaagtggcgatgcgcagcgtatttaaactgttctggcgacccgaaggtttgccgggcgacccgctggaagcttatcaacaattacgctggacacggaatagccagggtgtacaactcactaacccaacgccttattacattaacctgattcaggtgagtgtaaatggtaaagcgttaagtaatgtgggagttgtgccgcctaaaagccagcgtcagacaagctggtgtcaggcaatcgcaccgtgtcatgtcgcctggcgggcgataaatgattacggcgggttgagtgcaaagaaggagcaaaatctgccctgaaacaggttcggaaaacgtttgcgttttttttgccgcaggtcaattcccttttggtccgaactcgcacataatacgcccccggtttgcacaccgggaatccaggagagttcatgtactaccccttcgttcgtaaagcccttttccagctcgatccagagcgcgctcatgagtttacttttcagcaattacgccgtattacaggaacgccgtttgaagcactggtgcggcagaaagtgcctgcgaaacctgttaactgcatgggcctgacgtttaaaaatccgcttggtctggcagccggtcttgataaagacggggagtgcattgacgcgttaggcgcgatgggatttggaagcatcgagatcggtaccgtcacgccacgtccacagccaggtaatgacaagccgcgtctctttcgtctggtagatgccgaaggtttgatcaaccgtatgggctttaataatcttggcgttgataacctcgtagagaacgtaaaaaaggcccattatgacggcgtcctgggtattaacatcggcaaaaataaagatacgccagtggagcagggcaaagatgactatctgatttgtatggaaaaaatctatgcctatgcgggatatatcgccatcaatattagtagcccgaataccccaggattacgcacgctgcaatatggtgaagcgctggatgatctcttaaccgcgattaaaaataagcaaaatgatttgcaagcgatgcaccataaatatgtgccgatcgcagtgaagatcgcgccggatctttctgaagaagaattgatccaggttgccgatagtttagttcgccataatattgatggcgttattgcaaccaataccacactcgatcgttctcttgttcagggaatgaaaaattgcgatcaaaccggtggcttaagtggtcgtccgcttcagttaaaaagcaccgaaattattcgccgcttgagtctggaattaaacggtcgcttaccgatcatcggtgttggcggcatcgacagcgttatcgctgcgcgtgaaaagattgctgcgggtgccagtctggtgcaaatttattctggttttatttttaaaggtccgccgctgattaaagaaatcgttacccatatctaattatttcttcgaattcctctttataagataatcagggctttattttcagccctggttgttttatattcatcgctgttgcttatttagacattttgtacttttattgttgaggttattaagcgaagcgacaatggattgtgttgctgcggttttatagggtaggggagaggcagatgcgaattaaaccagacgataactggcgttggtattacgatgaagagcacgatcgaatgatgctcgatttagccaatggtatgctatttcgcagtcgttttgcgcgcaagatgttgactccagatgccttttctcccgcaggcttttgcgttgacgacgccgcgctctatttctcttttgaagaaaagtgccgcgattttaatttatctaaagaacaaaaagccgaactggtgctgaatgcactggtagcaattcgctatctcaaaccgcaaatgccgaaaagctggcattttgtttcccatggtgaaatgtgggtgcccatgccgggcgatgcggcctgcgtttggttgagcgatactcacgagcaggtcaatttgctggtcgttgaatctggcgaaaatgccgcactatgcctgctggcacaaccctgcgttgttattgcgggtcgcgcgatgcagttgggcgacgccattaaaatcatgaacgacaggctgaaaccgcaggttaatgttgacagcttcagcctcgaacaggcagtttaacgcgccaacttaagtgcagtcttcggtacacagctacagcaaagaatggtgccatcatcgcccattgcactttttttcagcggcgtgacttcgccttctaaaagctgaacacggcaacttccacaaatgcccgcgcggcaagaataagggatacgaattccctgattttctaattgctccagcaacacctgttggttatttccacgaaatgcctgtccctgccagtcaatatctacatttgcgtccggttgttgcgtgatgttggcggtatcatcagcggcagctgcgccgtaaatttttgccggagccgttgccagaatttccacctcatcgccaacgcgaatcacgccgctattacgggcaattaaattctgaccaaaatcgacatcgccgttatcctgggcagtgcggaaagattgcaatgtttttaatggttcgcctgccggatgtttttgccctttttctgggctgacggtggtgaaaatacagcggctacaaggtttaaccacatcaaacaccacatcaccaatgcgaatcactttccagcgatcttcttcccaggcactcgcgccggaaaccaccagattggggcggaattgctccatttttacactggccggacaacgttgttggagatcacgtaagctggcttcgttagcaagaaggtaaggatagccatcagcaaaactcagaggtacagtgttgtggcgtttcacgcgccgggtcatttgtggccccacccagcgtaattgcacttcgcgggagaaaaatccacttagccatttgttgatcgcgtctggcgcaattcgcgcggtaaaatgtgtgccccaaacttcggttggtgcgtcttgtgtggcgaaatcagcaaaacgaacatatgcgctactgccatctggtgcggtgagatgcaagccatcatgcacaggactaggagtaaaccgtaccatctggggaaactggcgagcggtaataaacgtaccgtcaggttccgtgatcataaagatgcgatcgaaggccagaccactgacatctgccagagcatgtgtaagaccaatgccgcgcatgcttttaacaggatgaataaaaagccggattaatgtcgccacggtgcggtcctcaaatgaaaataagccctcaactttatgacatgacgcgcttattagctataatgcgcaacaattttcttagcgcctgtcccattaggctattttatttgtcagtttggccctgggttatgctcgaaatcctcacgtacttgtgtacgctccggtttctccgcgctgtccatgtccagactgactgcaacaattacgcctactgcggtaggctcttagagtaaaagtgacgatatgaattctctgtttgccagtacggcccgtgggctggaagagctgttaaaaactgaactggaaaacctgggggccgttgaatgccaggtggttcagggtggggtccatttcaagggcgacacacggcttgtttaccagagcctgatgtggagccgcctggccagccgtattatgttgccgctgggcgagtgtaaggtttacagcgatttagacctctatctcggtgttcaggcgatcaactggacagagatgtttaatcctggcgcgaccttcgctgtccacttcagtggtttgaatgacaccatccgcaacagtcagtacggcgcgatgaaagtgaaagacgcgatcgtcgatgctttcacgcggaaaaatctgccgcgtccaaatgttgatcgcgatgcgccggatatccgcgttaacgtctggctgcataaagaaaccgccagtatcgctcttgatctgagtggtgatggtttacatctgcgtggctatcgcgatcgtgctggtattgcgccgatcaaagaaaccctggcagccgctattgtgatgcgatccggctggcagccaggaacaccgctgctcgatccgatgtgtggttccggtacgttgctgattgaagcagcgatgctggcgaccgatcgcgcaccaggcttgcaccgtgggcgttggggctttagcggctgggcgcagcatgatgaagctatctggcaggaagtgaaagcggaagcgcaaactcgcgcccgtaaaggcctggctgagtatagctctcatttttacggtagcgacagcgacgcacgggtgattcaacgtgcacgcactaacgcccgtcttgcggggattggtgaactgatcacctttgaggtgaaagatgtcgcgcaactgaccaatccgctgccgaaagggccgtacggcacagtgttgagcaacccgccatacggggaacgtctggacagcgaaccggcgctgattgcgctgcatagcctgctgggtcggatcatgaaaaaccagtttggtggctggaatctctctttgtttagtgccagcccggatctgctaagctgcttgcagctgcgtgcagacaaacagtacaaggcgaaaaacggcccgctggactgcgtacagaaaaattaccacgttgccgaaagcactccagacagcaaaccggcgatggtagcggaagactacaccaaccgcctgcgtaagaacctcaaaaaattcgagaagtgggctcgccaggaagggattgaatgttaccgcctgtatgacgccgatctgccagaatataacgttgccgttgaccgttatgccgactgggtggtggtgcaggagtatgcgccgccaaaaactattgatgctcacaaagcgcgtcagcgtctgttcgatattatcgctgcaaccattagcgtactggggattgcgccaaacaaactggtgctgaaaacccgtgaacgccagaagggcaaaaaccaataccagaaactgggcgagaagggcgagtttcttgaagttaccgaatataacgctcacttgtgggtgaacctgacggattatctcgatactggtctgttcctcgatcaccgcatcgcccgtcgtatgctcggtcagatgagcaaaggcaaagatttcctcaacctgttctcttataccggcagcgccaccgtgcatgcgggattaggcggtgcacgcagcaccaccaccgtggatatgagccgtacttatctggaatgggcagaacgcaacctgcgtctgaatggcctgaccgggcgtgcgcatcgcctgattcaggccgattgcctggcgtggctgcgtgaggcaaatgaacagttcgatctgatctttatcgatccgccaaccttctctaacagtaaacgaatggaagatgcgtttgatgttcagcgcgatcatctggcgctgatgaaagatttgaaacgtctgctgcgtgcaggtgggacgatcatgttcagcaacaacaaacgtggcttccgtatggatctcgacggcctggcaaaactgggactgaaagcacaagaaattacgcaaaaaacgctctcccaggatttcgcccgtaaccgccagatccacaactgctggctgattaccgcagcctgaaaggaatagtaatgagtttaatcagtatgcatggcgcatggctgagcttcagcgacgcgccgcttctcgataacgcagaactgcatatcgaagataacgaacgtgtttgtctggtgggccgcaacggcgcaggcaaaagcacgttaatgaaaatcctcaaccgtgaacaagggctggatgacggtcgcattatttacgagcaagatttgattgtagcgcgtctgcaacaggatccgccgcgtaacgttgagggtagcgtttatgatttcgttgccgaaggcattgaagaacaagcggaatatctgaaacgctatcacgatattagccgcctggtgatgaacgacccgagcgagaaaaatctcaacgaactggcgaaggttcaggaacagctggatcaccacaacctgtggcagctggaaaaccgcatcaacgaagtgctggcgcaactggggttagatcctaacgttgcgctgagcagcctttccggcggctggttgcgtaaagcggcattaggacgcgcgctggtgagtaatccgcgcgtgctgttgcttgatgaaccgacaaaccacctggatattgaaaccatcgactggctggaagggtttttgaaaactttcaacgggacgattattttcatctcccacgaccgtagctttatccgcaatatggcgacgcgcattgttgatctcgatcgcggcaagctggtgacctatccagggaattacgaccagtacctgctggaaaaagaagaagccctgcgcgtggaagaattacaaaatgccgagttcgatcgcaaactggcgcaggaagaggtgtggatccgccaggggatcaaagcacgccgtacccgtaatgaaggccgcgtacgcgccctgaaagcgatgcgtcgcgaacgtggtgaacgtcgcgaagtgatgggtaccgcaaagatgcaggtggaagaggccagccgctccggtaaaatcgttttcgaaatggaagacgtttgctaccaggttaacggtaagcaactggtgaaagatttttctgcccaggttctacgtggcgacaaaattgccctgattggtccgaatgggtgcggcaaaaccacgctgctaaaactgatgctcggtcagcttcaagcggacagcgggcgtattcacgttggcaccaaactggaagtggcttatttcgatcagcaccgcgcggaactggatcccgataaaacggtgatggataaccttgccgaaggtaagcaagaggtgatggttaacggcaagccacgccacgtattgggctatttgcaggactttctgttccatccgaaacgggcgatgacgccggtacgtgcgctttctggcggtgagcggaaccgcttgctgctggcgcgtttgttcctcaaaccaagcaacttattgattcttgacgaaccgaccaacgatcttgatgtcgaaacgctggaactgctggaagaactgatcgacagctatcagggcacggtattgctggttagccacgatcgtcagtttgtcgataacaccgttacagaatgttggatcttcgaaggcggcggtaaaattggtcgttatgtcggcggttatcatgatgcccgtggtcagcaagagcagtatgtggcgctcaaacagcctgcggtgaaaaaaaccgaagaagccgccgcggcaaaagcagaaactgtaaaacgcagcagtagcaaactaagctataaattgcagcgcgaactggagcagctaccgcaattgctcgaagatctggaggcgaagctggaagccctacagacgcaagtggcggatgcttccttcttcagtcagccgcatgagcagacgcaaaaagtgcttgctgatatggctgctgcagagcaggagctggagcaagcctttgaacgctgggagtatcttgaagcgttaaaaaatggtggctgatcgcaaaatagtcgatttaaacagagacagctgacaacggtaaaattgcctgatgaactgggtttatcaggcatgaaaaccaacactttgttagtcatctgtaaaatagcgcatcattaaggagtaccaatgtgcgaacatcatcatgccgcgaagcacatcctgtgcagccagtgtgacatgctggtggcgttaccgcgccttgagcatggtcagaaagcggcatgtccccggtgtggcacaacgttaaccgtggcgtgggatgcccctcggcagcgtcccaccgcctatgcgttggctgcactgttcatgctgttgctgtccaacttgtttccttttgtgaatatgaacgttgcaggagttaccagtgaaattacattactggaaattcccggcgtgcttttttctgaggactacgccagcctcggcacctttttcctgttgtttgtgcaactggttcccgcgttttgtctgataaccattctgttactggtgaatcgcgcggaattaccggtccgtttaaaagagcaactggcacgggtgctttttcaactcaaaacctggggaatggcggagattttcctcgcgggtgtgctggtcagtttcgttaaactgatggcttacggcagcattggggtaggcagcagctttctcccctggtgtttattttgtgtcctgcaactgcgcgcttttcagtgcgttgatcgtcgctggttatgggacgacatcgccccgatgccagaactgcgccagccgctaaaaccaggcgtcacggggatacgtcaggggctgcgtagctgctcctgttgtacggcaatccttcctgctgatgaacccgtgtgcccgcgttgtagtaccaaagggtacgttcggcgtagaaacagcctgcagtggacactcgcgctgcttgtaacgtccatcatgctgtatcttccggctaatattttgcccatcatggtgacggatttattaggcagcaagatgccgagcacgattctcgctggggtcattctgttatggagcgaaggctcttatcccgtcgctgcggtgatctttctggccagtattatggtgccaacgttaaagatgatcgccatcgcgtggctgtgttgggatgccaaagggcatggcaagcgcgacagtgaaagaatgcatttgatttatgaagttgttgagtttgtaggccgctggagcatgattgacgttttcgttatcgcggtgctcagcgcgctggtgcgtatgggaggtttaatgagtatttatccggcaatgggtgcattaatgtttgctttagtcgtcataatgacaatgttttctgctatgacgtttgacccgcgtttgagctgggatcgtcaacctgaaagtgagcatgaggagtcctgacagtatggaatctaataatggggaagccaaaatccagaaagtgaagaactggtctcccgtgtggatatttcctatcgtcacggcgctcattggggcctgggttcttttttatcattacagccatcagggaccggaagtgaccctgatcaccgcgaatgcggaaggaattgaaggtggcaaaaccaccattaaaagccgtagcgttgacgtcggcgtggttgaaagcgccacactggctgatgatttgacgcacgttgaaatcaaagcgcggctgaattccggtatggaaaaattgctgcataaagacaccgtcttttgggtggtgaaaccgcagattggtcgcgaagggattagcggcctgggaacgctgctgtctggagtttatatcgaactgcagccaggcgcgaaaggcagcaaaatggataaatacgatttgctggacagcccaccgttggccccgcctgatgcgaaaggtatccgtgtgattctcgatagcaaaaaagccgggcagctcagcccaggagatccggtgctgttccgtggctatcgggtaggtagcgttgaaaccagcaccttcgatacacaaaaacgcaatatcagctatcaactgttcatcaatgcaccttatgaccgactggtgaccaacaatgttcgcttctggaaagatagtggcattgcggttgatctgacgagtgcagggatgcgtgtggagatgggcagtttgacaacgctgctgagtggcggtgtcagctttgatgtgccggaaggtctggatttagggcagccagtggcaccgaaaacagctttcgttttgtatgatgatcagaagagcattcaggatagcttgtacaccgatcacattgattatctgatgttctttaaagatagcgtacgcggtctgcaaccgggagctccggtagagttccggggtattcgcctgggtaccgtaagcaaagtgccattctttgcgccgaatatgcgtcagacatttaacgatgattaccgtattccggtactgattcgtatcgagccagagcggctgaaaatgcagcttggcgaaaatgcggatgttgttgagcaccttggcgaattgttgaaacgtggtttacgcggaagcctgaaaaccggaaacctggtcactggtgcactgtatgttgatctcgatttctatccaaatacgcctgcaataaccggtattcgtgaatttaatggttatcagattatcccgaccgttagcggcggcctggcgcaaatccagcaacgactgatggaagcgttggataagatcaacaaactgccattgaatccgatgattgaacaggcaaccagtacgctttctgaaagtcagcgcacaatgaaaaacctgcaaacgacgctggatagcatgaacaagatcctcgctagccagagcatgcagcagttgccgacggatatgcagagtacgttgcgtgaattgaatcgcagcatgcagggcttccagcctggctccgcagcctacaacaagatggtggcggatatgcagcgccttgatcaggtgttgcgagaactgcaaccggtgctgaaaacgctcaatgagaagagtaacgcgctggtatttgaagcgaaggacaaaaaagatccagagccgaagagggcgaaacaatgaaaaagtggctagtgacgattgcagcactgtggctggccggatgcagctccggcgaaattaataaaaactattaccagttacctgtggtgcagagcggtacacaaagtaccgccagccagggcaatcgtctgttatgggtagagcaggtcactgttcctgactatctggcggggaatggtgtggtttatcaaaccagtgatgtgaagtatgtgattgccaacaacaacttgtgggccagcccgttggatcaacagttgcgcaacaccctggttgccaacctgagtacgcaactgcccggctgggtggttgcctcccagcctctgggaagcgcccaggacacgctcaatgttaccgtaacggagtttaacggtcgctatgatggcaaggtcattgtcagtggtgagtggctgttgaaccaccagggacaactgatcaaacgtccgttccgtctggaaggagtgcaaactcaggatggttacgatgagatggttaaagtgctggccggtgtctggagtcaggaagccgcttctattgcacaagagataaagcgtctaccttaattataaagatttgtaaatataaccgtctccggtatgttgcctgaggcggtttttttgtctctaacgtgcggaaaaatttgttcctcttcacattttttgtacaaccgacatgcccgtgtagctcacaaatatgacagtggcgtgaattttgcgcattgacggcagttatgattcgcggtattgcttaactgtgattgcacatttagtaatcactgttttcttttccaccagaaaccagtatgagggaaacgaggcatgaagagacaaaaacgagatcgcctggaacgggcacatcaacgtggttatcaggccggcatcgccggacgcagtaaagaaatgtgtccctatcagacgctgaatcaaaggagtcaatggctgggaggctggcgagaagccatggcggacagggtagtaatggcctgattctgtctctttaaaaagaaacctccgcattgcggaggtttcgccttttgatactctgtctgattataatcagaaggcagacgtatcctggaacagaccgactttcaggtcgctggcggtatagatcagacgaccatcaaccagcacttcgccatccgccaggcccataatcagacgacggttaacaatgcgtttaaagtgaatacggtaggtcacttttttcgctgtcggcagtacctgaccagtgaatttcacttcgccaacgcccagcgcgcggcctttaccttcgccgcccagccagccgaggtagaaccctaccagctgccacattgcgtccaggcccaggcatcccggcataaccggatcgccaataaagtggcatccgaagaaccacagatccggattgatatccagttctgcttcaacataccctttgtcgaagttaccacccgtttcggtcattttgaccacacggtccatcatcagcatgttcggtgctggcaattgcgggcctttagcgccaaacagttcaccgcgaccagaggcaagaaggtcttcttttgtataggattcgcgtttatctaccatgttctctgtaagccttattttattgaagcacgcaggatagctaacacgtgtacgctgaacaagtccgatcagttcggaataaaccagttcagccaacgtaatggccatggaaaacggtgacgtccttcctgttggcttgcttgcgcgatacgttcctggatggtttgcatcagcgtcgtttggccttcgccatcccacaccagatttaataataacggcagtgcgtcagtcacatcgtctactgcccagatggtgaatttgccttcttctaccgctttcaccagttcactgtgaagacttaaatggcgaacgttagctgtggggataatgacaccttgtttcccggttaactcacgttgctggcaaatagcaaagaagccttcgattttctcatttaaaccaccgaccggctgggcgcgaccgaactgatcgacactacctgtgatagcgatactctgattcaccggcacatcggcgagggcgcttatcagggcgcagagttcagccatgctggcactatctccatcaacttcactgtaactctgctcaaatgtcaggcttgcactgaaggggatctgttgctcaagctgtagttcgctcatcaggaacgcttgcatgatcatcatccctttcgcatggatattgccgccaagctccgctttgcgttcgatgtcggtgaattcaccatcgccaatatgcacaacgcagctaatgcgagaaggttcgccaaaagcgcgtggatgacccggaaattcaatgacgctaagggcgttaatttgcccgatgcgttcgccttcggtttcaatcaggatttgctcctgaaggatctcatcctgcatacgttcagcgaggaaaccttcgcgccattcacgctgctgcagcattaagtttagctgctcgccggagaaggtgtcgccatcacacagggaggcgacctctttacactggcggaggatccactgcgggctaagcggaagtgtttcttgttcaccggtgtagcgtgctgcttcgcggataagtatcggccaggcatccgctcccggtgcaggtaagtgattatgtctggcggtaaatgtcacccagcgacaccactgggttacactctccgcatcgacaatctgcagagtatcttcaaattcgctataaatagcctgctcactaagctctggctccatctcctggaaatcagccaaactttcgcgttcgcctaccagaatgactttcagcttcaatggcatgctaggcacagagacggggagagggcggctctcatcaaacgcaacccagtcaaaacgctcgcggttaacgatatttttcagccgcatccacagcagaggttgcgccagcagtgtacgcaaagagataatgagaataccgccatttgcctgatgcaccagaccaggctgcagggtaatgtcgccattaaactggcgcaggcagccaaagagttgctccgcttctacccagtcggcagcgacaacttgcgttaaagtcgcaaaattatcatctgcactcactgcgtgacgtaagcggatggagtggccggaaacctcatagtgaccgcccaccagttggcctgcatcgctttgtagcgtacgcgcggcattggcaataagattcagatactcagactcttccggggccttcgccagcataaaagaggaggatgctcgcgtatgcagcaactgctccagcgcaaattgcagccgcggttgagtatcactgaataaaggatcgttttcgtcaatcaaatgtggctgagcaaatatttcctgatagctatcggtatcaggaaccaggtcacgccatgcaagtttcgtaatggtcaaagttgatgttttttagtctgttgtcaaagccgcgattataccgtaaccggcactacagcacacgtagaaagcaccgacaatactcctggcatgggcgttaaagctcacaggatggagattcttttcttcactggcctaaaaagctgatattctgtaaagagttacacggtaacattgagatcgctatgaaatatcaacaacttgaaaatcttgaaagcggttggaaatggaagtatctggttaagaagcatcgcgaaggggagttaatcacccgttacatagaagccagtgccgcccaggaagccgtcgatgtgttgctcagcctggaaaatgaacccgtgctggtaaatggctggattgacaagcatatgaatccggaactggtcaatcgcatgaagcaaaccattcgggcaagacgaaagcgccattttaatgcggaacaccagcatacgcgcaaaaaaagcatcgatctggaatttattgtctggcaacgtctggctggtcttgcgcagcgtcgcggtaaaacgctttctgaaacgattgttcagctgattgaagatgcggaaaacaaagagaaatacgcgaataaaatgtcttctctgaagcaggatctgcaggcattgctgggtaaggaataactgacgaaagtcagttcaatttactaaaggcaaaaaaaaccccgcagcagcggggtttttctaccagacgagaacttaagcctgcggctgagttacaacgtctttgatacctttaacttcgatctctacgcgacgatccggagccaggcagtcgatcagtgcagcacgctgtttcacgttgtcacaggtgttgccagtaaccgggttggattcgcccataccacgtgcggagatcttgtctgccgggatacctttggagatcaggtaatcaacaacagactgagcacggcgctcggacagaccctggttgtaagcgtcagaaccgatgcggtcggtgtaacccagaacaactacggaaccgtctttcggatccaggttgctcagctggctgtacagctgatccagagcagcctgaccttccggtttcagggttgctttgttgaagttgaacagaacgtcagacttcagagtgaagtgcttggtctgtacttccggtgccggagctggagccggagcaactactggagctgcttcgccctgaccgaaacggtaggaaacacccaggctcagcatgccgttgtccggacgagtgccgatggtgtgtgcgtcaccgatgttgttggtccactggtattccagacgggtagcgatttcaggagtgatcgcgtactcaacaccgccagcgaagaccggagaaacgccggtgtcgtggtttttaccataaacgttggatttagtgtctgcacgccataccatgccacccagacgagtgtagatgtccaggtcgtcagtgattgggtaacccagtttagcggtcagttgaacgccctgagctttgtatgcaccgttttcaacgctgcctttgtacggcatacgacctaaccagtcgtaacccatttcaaagccaacatacgggttaacctggtaaccaccaaaagcaccagcgcccagttggttttcatgggtcgggccattgttgttgatgaaaccagtgtcatggtactgggaccagcccagtttagcaccagtgtaccaggtgttatctttcggagcggcctgcgctacggtagcgaaaccagccagtgccactgcaatcgcgatagctgtctttttcattttttgcgcctcgttatcatccaaaatacgccatgaatatctccaacgagataacacggttaaatccttcaccgggggatctgctcaatattaactctaccgatatcttcggcttatgccgagcacccctggcgatgtaaagtctacaacgtagttgaaaacttacaagtgtgaactccgtcaggcatatgaaaaaaaagtcttgtataaggtatgtttaatcttttttgtcagcgacaatttacagaagagaatcgcggaaaccgcttcagacaagcctccgcaaggaaaattagtcacgactgaaagcattggctgggcgacaaaaaaagttccaggattaatcctaaatttacttaatgatacaaattagagtgaatttttagcccggaaagttgtctcgtggcgtgagaggatgcgcttaccggacgcataataaaccccatagcgttaccttcatttgccgcatcaacaagttcagcatgctcttcttcagtcaaatcatctgccaaccaaccgatcaccacactgtaattgcccgtgcgtaaagcgcgaaccatactctccacagtgtggcaaggggagagctggctaatctgcattactttcgttaagggtagcccagatgcctgaacccattcccgactcagtttttgttgcggtgttaaccagagttgccagcggctttgctgaccgagttgctgtaacaatggcaacagtagaagttgcgtcatcatgggctgatcttcgcgatagacaacttcactgataagcccggctgtagtgttttccgtagagacacgcgcaattttacttgctgcggaactgaagctgctagaacgatgtgcatagccactagtgtacataatcaatccagcccctgtgagttactgtatggatgtacagtacatccagtgacaacaaagatcaaccctattttcggaaagagcctcgcaaattttgtcgttggtgacgggaaaacataaattaatcttgccccttaagaataagttgcctattttcgtagttaacggatccgttaatgtgaatcattcttttatgttatgattttaaaaggaattttatgaaaagcctctcctataagcggatctataaaagtcaagaatacctggcaacgttgggcacaattgaataccgaagtttgtttggcagttacagcctgaccgttgacgacacggtgtttgcgatggtttctgatggtgagttgtatcttcgggcttgtgagcaaagtgcacagtactgtgtaaaacatccgcctgtctggctgacatataaaaagtgtggccgatccgttaccctcaattactatcgggttgatgaaagtctatggcgaaatcaactgaagctggtgcgtctgagcaaatattctctcgatgcagcgctgaaagagaaaagcacgcgcaatacccgggaaagactgaaagatttgcccaatatgtcttttcatctggaagcgattctcggggaggtggggattaaggatgtacgggcgttacgtatacttggggcaaaaatgtgttggttgcgactgcggcagcaaaacagtctggtgacagaaaagattctgtttatgcttgaaggtgccattatcggcattcatgaagctgcgctcccggtggcacgccgccaggagcttgcagaatgggctgactctcttacgccgaaacaggagtttcctgcggaacttgagtaattacgcgctaacaggagtttcctgcggaacttgagtaatctggcgttgcagacgaccaatctcaggcagtaatgcaatcaataatccaacttgttgtacgaccagaggttctttgctgtctgcccgtggttcaagttgctgcatccgctgtttcaggctagctaatgcctcattgacgcgttcttcatcagcaggttgatgatgtaacgcgtcatcaacatagcaaactgcgtcatcaagaaacgccagaatttcaggattagttaactgctcccggtgagcaccgagggcactgatatagctggtaaacgtatggttaaggcacagcaaccgaaacgcggcttcgcgaatttgcggggtaacgttcggctcgctggacatattacttaccacgctcgccagctcagcatcacggttgtgtgcatcgcggcgggcaatacgatacgccagacggttatcacgcccctgatggtattgctccagtatggcatcgagataccgacagttggcctctgtggcacgttcgagcatgcgcggcagattgcgaaactgccagtcaggccagatgtagctcactgccgcccacgcaatggcacaaccaatcagcgtatcgattacgcgaggtaacgctacttcaaaaccttcacccagtaagttaaaacacagtagcaccaaaagtgtgatgaacatcgttgcatgagcgtattgcacgttacggaaggcaaaaaagagcacgccggtaataaccagcagcaccagctgcccttccagacttggcacaaaccacagcacaggaatgccaatggcgatacctaccagcgtaccaataatccttaacttcaggcggtggcgcgtggcgttatagtttggctggcagacaaacaaacttgtcagcaagatccaatacccgtgatgcattccggttatctgaatgatggcgtagccgaagcacaacaccaggctcattcttaccgcatgacggaagagggcggattccggcgtgaagtgacggctaagacgcagccagatatcactcaacccgtgcgggctgtcatcagcgagctcattttcgtcattattatggggtagtgcctgggcctgttcactttcaattgttgccagttgggcatcaatggcgcgtaaattgttcagcaaaaatcccagtgttttgagtaaatcggcgggtgcgccgttatcgcgcatccgctccagcgcagcatcaatatgcgtaaaagcgcgctcaaaatgcggatcatgttgataaggctgacgcaacaaaatacagcgactcagttgctggcacgcctggccctgcatgctcatcagccgctgaaaacggaacagcacgtcgctgtggcgaaaatgttcacgcaatgtttgatactgaatatgagaagagctggcacgctcgtgaatatcctgtgcgacaaagtaataatgcagcgtgcgacgcgttccccgttgaccacgatcgccacgtaagcgggtcagcaggctgagtttcgtctgattcaatgtcgccatcagcagaccgttggcgagagccaaatcgtacagcggtgcctggctttgatcttcaatatcaggatcaaacatgcggctcttgagctcaagataacgcgccagttgttcatagcaacgcgccaggttgtcctgcagcgggcggaccgggaacagcagatgaccaataagtgtcaggacgttgtaccagacggcaccggccagcagatacatcggctgctgataccagtgctcatacagacttgttcccaacatagtgtaaatggcgatcagcaatgcaccgaaggcaattgttgcatagcgttgacccagaccgccgagcaaaatgaagccgctggtagagagcgttaagccaatcgcaaatagccagggccagggaaacagcaattctacactggcgctggcgataaaaaagcagaacagcgtaatgatgaggttacgcaaacgtcccgccagtcggtcatcgagatcggtcagcgccgctgccaccatccccagcgttagcggaatcgtcagttttacatcacccagccaccacggaaacgctgtggttccacaaagcgcaataaaaatacgcgcgtaatacagccaggcgctgttccaggtatagcgtttgagcaaaggacttagcataaaggccatattagtggattattcaaaacgacgacgtgcattggcttcacgcgcagcttgcgctgtttctacgcttaccacgcgacgaccaaccggccatagtgcaatagcggcaattttaaagttcgcaatgccgacaggaatgccaatgatactaatacattgtgcgatgcccgttgcaatgtgcatcaggcataaccaccagccaaagaaaatcagccagaaaatattcaataccgtaccgccagtattcagcagcacatttttgccagccgggttcagttcatcgacatgaatagcttcattgccataaggcaccagagacagtttagtgatctcccagcaggatcgtgtcagcggtaaggtaaaaatcagcacaatactgaccagagtcgccaacagccagcccagagtggtggcaaatccgccaagcacaaagttcagaatgttcaaaacggtacgcataaaacctcgctttactgtggttttcagtaatgggcggcaattgtaacgtttttttgggctggagcacgttttctctgacggttacactgataagaaataatttcgtgtggatctacagagtcatggaactgaaagcgacaacgcttggaaaacgtctggcacagcacccttacgatcgggcggtgatcctcaatgccgggattaaagtctccggcgatcgccacgaataccttattcctttcaatcaattactggcgattcactgtaagcgcggtctggtatggggcgagctggaatttgtactgccggacgaaaaagtggtgcgtctgcacggcaccgaatggggcgagacgcagcgtttttaccatcatcttgatgctcactggcggcggtggagtggcgagatgagcgaaattgcgtctggtgttttacgccagcaactggatttgattgccacgcgcactggggaaaataaatggctgacgcgtgagcaaacctctggcgtgcagcaacaaatccgccaggctttgagcgcgttgccgttgccggttaaccgactggaagaattcgataactgccgtgaggcgtggcgtaaatgtcaggcctggttgaaagatattgaaagcgctcggttgcagcataaccaggcgtataccgaagccatgcttaccgagtatgcggattttttccgccaggtcgagtctagtccgctgaatccggcgcaggcccgggcagtcgttaatggcgagcattctctgttagtgctggcaggtgcaggaagcggaaaaacgagcgtgctggtggcccgtgcaggctggttgctggcgcgtggtgaagcgtcccctgagcaaattttattgctggcgtttggtcgcaaagccgctgaagagatggacgagcggattcgcgaacggctacataccgaagacattaccgcacgcacgtttcatgcgctggcgctgcatattattcagcagggcagcaaaaaagttccgatagtcagcaaactggaaaatgataccgctgcccgtcatgaactctttattgctgagtggcgcaagcaatgcagcgaaaagaaagcgcaggcgaagggctggcggcaatggctgacggaagaaatgcagtggagtgtgccagaaggtaacttctgggatgatgaaaaattacagcgtcgccttgcctctcgcctcgatcgctgggtaagtctgatgcggatgcacggtggtgcacaggcagaaatgattgccagtgcacccgaagagattcgcgatctgttcagtaaacgtatcaagttgatggccccgttattaaaagcctggaaaggtgcgctgaaggcagaaaacgctgtcgattttagcggccttattcatcaggcgattgtgattctggagaaaggtcgctttatcagcccgtggaagcatattctggttgatgaatttcaggatatcagcccgcagcgggcagcgttgttagcggcattacgcaagcaaaacagtcagacgacgttgttcgctgttggtgatgactggcaggcgatttaccgattcagcggtgcgcaaatgagcctcaccaccgctttccatgaaaactttggtgaaggcgaacgctgtgatttagacacgacttaccgttttaacagtcgtatcggtgaggtggcaaaccggtttattcagcagaacccaggccagctgaaaaagccgctaaacagcttaaccaatggagacaaaaaagccgtcacgttattggatgagagtcaacttgacgctttgctggataagctctctggttatgccaaaccggaagagcgcattctgatcctggcgcgttaccatcacatgaggcctgccagcctggaaaaagcggcaacacgctggccgaagttgcaaatcgactttatgaccattcatgccagcaaagggcaacaggcggattacgtcatcatcgttggcttgcaggagggaagtgatggttttccggctgcggcgcgggagagcattatggaagaggcgctactgccaccggttgaggatttcccggacgctgaagaacggcggttaatgtacgtggcgctgacccgggcacgccatcgggtatgggcactgtttaacaaagagaatccctctccctttgtggaaatactgaaaaatctggatgtgccggtggcgagaaaaccgtaagaaacaggtggcgtttgccacctgtgcaatattacttcagacggtccgcgagataacgctgataatcggggatcagaatatcgaccgcgtcgttgaaatgcgggctctggattatgaagtctgccgttgccacgttggtggcgaccggaatgttccataccgtcgccagacgcagcaaggctttcacgtcaggatcgtgcggcacggcatttagtggatcccagaagaaaatcaatacatcaattttcccttcactgatcaatgcgccaacctgctggtcaccccccattgggccactcaacatcgcgttgacgttcatgccggtcgcgcgggaaattaagttaccggtagtgcctgttgcatacagtacgtgttgttccagtaacggttgatgccgttccacccagctcatcagcatttgtttgcagtgatcgtgtgccaccagcgcaatatgtttccgcgcaggtaaagtgcgagtcgtcagttccataatgtacatccgtagttaactttcctacagattactgtaagcacttatcgctgcaagataaagaccgaaaaagcctgcgcacaggcacaaaaatctcaggaagatggttgtttttccgcccactgcaggaaagtatttcgcgtttgtgggtcagccagtttaaaccaatacttcagccgttgttctgtgagcacctgagactgcggtggaatagcatccagctcggaaacaccgctaagcagcgtactgtcatctgccatcatcgtggcaaattgcggtagactagcgcgtttcgcggatttgttatagcgttcaacctcgacctcataatcaatcgtttttgccgtactggtaatggcgagaatatccagctttaccggaatcggcgtcgcatcgccatccaacaattcaaggcgcggcgcggcatcaaaatggttagcttcccgctcattctccaggcgaggcaggcgaaaattgacctggttgatgagctgggtattaaaactgaccaccagcggtggggagatatacagccgttcttcactattggaaagatgaatcgtcttctcaacgcgaaacactaactgatgcggtccattatccagttcaatgctgtccgcaccgcgcagcagagagctggaaaccttcttgccgtcgagtaccagaagatcgacatcggtactaagccgcagcgtggtggcaaaaacggataccggcaaacataatgcaatcaaggtggtcacgatgccggttttcataggtagctcctgtcaaaagaccgcccgaataataatgtgtcaaaatttttctttaatcatacttactaacatatagacatatttcccgcttttgctctcattcattcgtattagctgcatggttggcatgtcggctttgtcgtacactttgttaaacagtctggaggaaataatgaaagaaaccgatattgcaggcattttaacgtccactcacaccattgcgctggtgggggcaagcgacaaacccgatcgtcccagctatcgcgtgatgaaatatctactcgaccaggggtatcacgtcattccggttagcccaaaagttgccggcaaaacgctgctgggccagaaggggtatggcacgctggcagacgttccggaaaaagtcgatatggtcgatgttttccgtaatagtgaagcggcgtggggcgtggcacaggaagctattgccattggcgcgaaaactctctggatgcaactgggggtgattaatgagcaagcggcagtactggcacgggatgccgggttaaatgtggtgatggatcgctgcccggctattgagatccctcgcctgggcctggccaaataaaaaatccccggaaggcaaaaaccttccggggatttgttcagggattagttacgcagacgcggggcctggagttgtttgcggatggtctgcgccagctcatccatggatggctgttcaggatgttcatcctgcaattcgctacttagctgggcttcagccaggtaggtatgaaccggtaggccgttatcgtcctccatcactacgtgataccacggagcggcgcgaagctcgtcattcaccgccagctcatcagggctcggttcagagaggctataaaccgggtcgatatccacgaccactccgagataacctaacagggaatggcggacctgctggccgataccgaatttgctggcaatcatagtcacctcccgggaaatctttacctttgatataagggtaaaattccacatttcaagttacatgacgcgacaggcaaaccctttcagatatagcccttccggataggtagcgatcaccggatgatcggctgcctgacggaactgctctataaattgtacatcacgaccggcatcaattgcggcatccgcgatgattttctgaaataaatcgctggtcatcagaccggaacaggagaaagtcaggagaataccgccttcattcagcagctgaatcgccagcatgttgatgtctttataaccacgacacgcgcccatcaactggcttttattctcaacaaacttcggcgggtccatcacgataacgtcaaatttttcaccgcgatcgcgataagtacgcagcaatttaaagacatcatcacggacaaactcagccttgctcagatccagtttgttcagctcaacgttctgccgtgcaatatccagcgcttcctgggaggtatcaacgctgacaacctggctgcaaccgcccatcagtgcgcttacggcgaaaccaccggtataggagaaacagttcagcacacgtttattttcaacgtagcggcgggtagccaggcggctatcacgctggtccaggtagtagcccgttttgtgtccgtgctgaatatccaccagcagtttcattccgtgttcttcaatcggcagcagggcaggtggcaactcgccggtgacggggccctgggtcagctccattccttcttttttacgtaccgcgacgtcgctgcgatcgtaaatgctacattccgggtacagcgtttgcagggcactaattaatgccgcgcgctgatattctgccccagcactcagcagttgcagcaccagaaaattaccgaaacgatcgatagtaatacccggcaggccatcagattctccggcgattaaacgatagctgtcgaggccatctttttgcgccagccagtcacgccatttttgtgcttgttgcaaacggcgggaaaaaaaagcaatgtcgatagactcagacgggtcaaacgtccagacgcgcgcccggatttggctagctgggctataagcgccgcgtgctaaccattttccctgatgatcaacaatatcgatggtttcaccgaggctggctttaccttccatgcgggcaacggccccggaaaagacccacggatggcgacgaagtaatgatttttcgcgccctttggctaacactaaacgtacactcataatttacttttctgtcgatgcaaagaaatgggcgtcattgtccggagttttccatggatttgcaacgcgtccattaaggataaggagagcagcaatgagcaaagtctgcataattgcctgggtttacgggcgagttcagggcgtaggatttcgctacaccacacagtacgaagcgaaaagactgggtttaaccgggtacgccaaaaatcttgacgatggcagcgtggaagtggttgcttgcggtgaagaagggcaggtggaaaaattaatgcagtggttaaagagtggcggcccgcgttctgcgcgtgtagaacgggtgctcagcgagccgcatcatcccagcggggaattaaccgattttcgtatccgttaaatacattttaccggttttggcaggccagcaattttggtggcttgcttagccggacctttcggaaacagtcggtataaatagcggctgttacctttttcttcgccaaatttattcgccatcgcttttaccagcatacgaatcgccggagaagtattgaattccagatagaaatcacgcacaaaacgcaccacttcccagtgttccggactcaggctaatcccttcgttctctgcaatcaccacagccagcggctcactccactggctgctttctttgagatagccttcggtatccgtttctatctctttaccttcgaagatcagcataattattactaccttaatcagactggcggcagtgtaacaaaaaacaaagccccgcataaagcgaggctatgaaagtgttagcgggtgagattaatcgcggctagcgaagcccagaatgctcagcaggctgacgaagatgttgtacaggctaacatacaggctaaccgtggcacgaatatagttcgtctcaccgccatgaatgatgttgctggtttcaaacaagatagcgccagaggagatcagaatgaagaccgcgctgatcgccagatgcagagcaggcagctgcaggaagatattcgcaaccataccaatcagcaccaccacaatacccgccatcagcataccgccgaggaagctcatatctttgcgggtggtcagcacatatgcagagcagcagaagaacactaacgccgttccgcccagtgccatagcgattacgtcacccattccggcagacagataggtgttcagaataggtccgaggatataacccagaaaaccggtaaaggcgaatgcggagataatcccggtcggcttattcgccgttttataggtcaggaacatcaaaccatacatacccaccagcgtcagaatcagacccggagatggcagcatcagcaccgtactggcagttgcggtaatcgcgctaaaggccagcgtcaggctcagcagaaaataggtattacgcagcaccttatgggtgctaagcagacttgtacggtcatgactagaactaacaatacgatccattgagtcactctctatgacagatgtaattaattaagcagcataatgataatgcgtaagggcacccagaagttttacccatctttacgcatttgatctggaacaggtttaacagcggattatcaggtcattaagcaaatataacgccctgagaatttcgacaggcaaaagaaaaaggggttagcatttagctaaccccttatcttatttggcggaagcgcagagattcgaactctggaaccctttcgggtcgccggttttcaagaccggtgccttcaaccgctcggccacacttccggaatgacgcgcactataaacatcccgatgcggcgtgtaaacccctaatttgtttgtttgcctgaaaaacagccaaaagtgcattgatagcgtgaaataacagcagattgatcatttcatcaccatgaattccttctcttttactcgtttagcaaccggctaaacatccccaccgcccggccaaaagaaaaataggtccatttttatcgctaaaagataaatccacacagtttgtattgttttgtgcaaaagtttcactacgctttattaacaatactttctggcgacgtgcgccagtgcagaaggatgagctttcgttttcagcatctcacgtgaagcgatggtttgccttgctacagggacgtcgcttgccgaccataagcgcccggtgtcctgccggtgtcgcaaggaggagagacgtgcgatatgaataacgaggaaacattttaccaggccatgcggcgtcagggcgttacccggcgcagctttctcaaatattgtagtctggctgccacgagcctgggattaggcgcgggaatggcaccaaagattgcctgggcgctggagaacaaaccgcgcattccggtggtatggatccacggtctggaatgcacctgctgtaccgaatcttttatccgctccgctcacccactggcgaaggacgtcatcctttccctgatttccctcgattacgacgatactttgatggctgccgccggaacccaggcggaagaagtctttgaagacatcatcacgcaatacaatggcaaatatatcctcgcagtagaaggtaatccgccgctgggcgagcaggggatgttctgtatcagcagcggtcgaccgtttattgagaaactcaaacgtgccgctgccggagccagcgcgattatcgcctggggaacctgcgcgtcctggggctgcgtgcaggccgcgcgacccaatccgacgcaggcaacgcctatcgacaaagtcatcaccgacaaacccattatcaaagtacctggctgcccgccgatcccggatgtgatgagcgccatcattacttacatggtgacctttgatcgcttgccagatgtcgacagaatgggccgtccgctgatgttctatggtcagcgaatccacgataaatgctatcgccgcgcccacttcgacgccggagagttcgtccagagttgggatgatgacgctgcccgcaaaggttactgcctgtacaaaatgggctgcaaagggcctaccacctataacgcctgttcctccacacgctggaatgatggcgtttctttcccaatccagtctggtcacggctgcctgggctgtgcggaaaatggtttctgggatcgcggtagcttctacagccgcgtggtcgatattccgcaaatgggtactcattccaccgccgataccgtcggtttaaccgcgcttggcgtggtggcagcggctgttggtgtgcacgcagtcgccagcgccgttgaccagcgcagacgtcataaccagcaacctacagaaaccgaacatcagccaggcaatgaggataaacaggcatgagcactcagtacgaaactcagggatacaccatcaataatgccggacgccgcctggtggtcgacccgattacgcgcatcgaaggccacatgcgctgcgaagtgaatattaacgatcagaatgtgatcaccaatgccgtctcctgcggcaccatgtttcgcgggctggagatcatcctacaagggcgcgacccgcgcgatgcgtgggcgttcgttgaacgtatctgcggcgtctgtactggcgtacacgccctggctagcgtttacgccatcgaagatgctatcggtattaaagtgccggacaacgccaatatcatccgcaacattatgctggcaacgctctggtgccacgatcatctggtgcacttctatcagcttgccgggatggactggatcgatgtgttagatgcgctgaaagccgacccgcggaaaacctccgaactggcgcaaagtctctcctcttggccgaaaagttcccctggctatttcttcgacgtacaaaaccgcctgaaaaaatttgttgaaggcgggcagttggggatcttccgcaatggctactgggggcacccgcagtacaaactgccgccagaagctaacctgatgggctttgcccactatctcgaagctctcgatttccagcgtgaaattgtcaaaatccacgcggtctttggcggtaaaaacccgcatccaaactggattgtcggcgggatgccttgcgccatcaacattgacgaaagcggcgcggtcggggcagtcaatatggaacgcctgaacctggtgcagagtattatcacccgcacggcggacttcattaacaacgtgatgatccccgacgccttagccatcggtcagttcaacaaaccgtggagcgaaatcggcactggtctttctgataaatgcgttctcagctacggcgcattcccggatattgccaacgactttggcgagaaaagtctgctgatgcctggcggcgcggtgattaacggcgacttcaacaatgtgctgccagtggatttggttgatccgcagcaggtgcaggagtttgtcgaccacgcctggtatcgatatcccaacgatcaggtcgggcgtcatccgttcgatggcatcaccgacccgtggtacaaccccggcgatgtcaaaggcagcgataccaacattcagcagctgaatgaacaggaacgctacagctggatcaaagcgccacgctggcgcggtaacgcgatggaagtggggccgctggcgcgcacgttaatcgcttatcacaaaggcgatgctgcgaccgttgagagcgtcgatcgcatgatgagcgcgttgaacctgccgctttccggtatccagagtacgttaggccgcattttgtgccgcgcgcacgaagcgcagtgggccgcaggtaagttgcagtatttcttcgacaagctgatgaccaacctgaaaaacggcaatctcgccactgcttccacggaaaaatgggaacctgcaacctggccgacagagtgccgtggtgtcggttttaccgaagcgccgcgcggggcgttaggccactgggccgccattcgcgatggcaagattgatctctaccagtgcgtggtgccgaccacctggaacgccagcccgcgcgatcccaaagggcagattggcgcttatgaagcggcgctgatgaacaccaaaatggcgatccccgagcaaccgctggagatcctgcgtactctgcacagctttgacccgtgcctcgcctgtagtacacacgtgctgggcgacgacggtagcgagctgatctccgtgcaggtgcgttaacagcgaaggagaatcatcatgcaacagaaaagcgacaacgttgtcagccactatgtctttgaagcgccagtgcgcatctggcactggttgacggtgttatgcatggcggtgttgatggtcaccggatactttatcggcaagccgctaccttccgtcagcggcgaggcgacgtatctgttctatatgggctacatcaggttaattcacttcagcgccgggatggtttttaccgtggttttgctgatgcggatctactgggcttttgttggcaatcgatactcccgcgagctgtttatcgtgccggtatggcgtaaaagctggtggcagggcgtgtggtatgaaatccgctggtatctgtttctggcaaaacgtccgagtgccgatataggccataatcccatcgcccaggcggcgatgttcggctatttcctgatgagcgtctttatgatcatcactggttttgcgctgtacagcgaacacagccagtacgctatttttgcgccgttccgttatgtggtggaatttttctactggacgggtggcaacagtatggacattcacagctggcatcggctggggatgtggctgattggcgcgtttgtgatcggtcatgtctacatggcgctgcgtgaagacatcatgtccgacgacacggtgatctccaccatggtcaacggctaccgtagccacaaatttggcaaaataagtaacaaggagcgtagttgagctaaataagtaacaaggagcgttcatgagcgagcaacgcgtggtggtcatggggctgggcaacctgctgtgggccgatgaaggcttcggcgtgcgggtggcggaacggctgtatgcccattaccactggcccgagtatgtggagattgtcgatggcggtactcagggactgaacttgctggggtatgtcgaaagcgccagccatctgttgattctcgatgccattgactacgggctggaacctggaacgctgcgaacctatgccggagaacgcattccggcttatctcagcgcgaagaaaatgagcctgcatcagaacagtttctccgaagtgttggcgctggcggatatccgcggacatctgccagcacatattgccctcgtcggtctgcaacccgcaatgctcgacgactacggcggtagcctgagcgaactggcacgggagcaactgcccgctgcggaacaggcggcgctggcgcagcttgctgcgtggggaattgtgccgcaaccggctaatgaaagccgctgtctcaattatgactgtctgagcatggaaaattacgaaggcgttcgcttgcgccagtaccggatgacacaggaggagcagggatgagcaacgacacgccatttgatgcgttgtggcaacgaatgctggcgcgcggctggacgccagtcagtgaatcccgtcttgacgactggcttacgcaagcgccagacggcgtggtgttattaagcagtgacccgaaacgcacgccagaggtcagcgataatccggtaatgattggcgaattactgcgcgagtttcccgactatacatggcaggtggcgattgctgaccttgagcagagcgaagccatcggcgatcgctttggcgtctttcgctttcctgccactttagtgtttaccggcggaaactatcgcggcgtgctgaatggtattcacccgtgggcggaactgataaacctgatgcgcgggcttgtcgaaccgcagcaggagcgtgccagttgatctaaccgcagcaggagcgtgcctcatgagcgaaacttttttccatctgctggggccaggaacgcaaccgaacgatgacagtttcagcatgaatccactgccgatcacctgtcaggtgaatgatgaaccgagtatggcggccctggagcaatgtgctcacagcccgcaggtgattgcgctgttaaacgagttacaacatcaactaagcgaacgccaaccgccgttgggcgaggtgctggcagtcgatctgttaaatctcaacgccgacgatcgtcactttatcaatacgcttctcggggaaggggaagtgagtgtgcgcattcagcaggctgacgacagtgaaagtgaaatacaggaggcgatcttctgcggattatggcgggtgcgcagacgtcgcggcgaaaagttgctggaggacaaactggaggctggctgcgcgccgctggcgttgtggcaggcggcaacgcaaaatctcttgccgacagatagcctgttaccgccgcccattgatggcctgatgaatggcctaccgttggcgcatgagttactggcacatgtacgtaaccccgacgcgcagccgcacagcattaatctgacgcaattacccatcagcgaggctgatcggctttttctcagtcgtctctgtgggccgggaaatattcagattcgtaccattggctatggcgagagctatatcaacgccacggggttacgccatgtctggcatttacgctgtacggacaccttaaaaggcccgttactggaaagttatgaaatctgcccaataccggaagtggtgctggcagcgccagaagatttggtcgactctgcgcagcggcttagcgaggtatgtcagtggctggcggaagctgcaccgacgtaaaaagacggtaagtatcgctttcagtcttatgaatatcgcaatcggcgaatacctctggtcgtagagtttcaggataaagagggagatctaccattatcgggttatttttctctcttcgcctacaggagtgcgcatgtgggatgtcattgatttaagccgctggcagtttgctctgaccgcgctgtatcactttttatttgtaccccttaccctggggctgatttttttgctggctattatggaaaccatttacgtggtcaccggcaaaacaatctaccgcgatatgacgcgcttctggggtaagctcttcggtatcaattttgctcttggcgtggctaccggcctgaccatggagtttcagtttggtactaactggagtttctattccaactatgtgggcgatatttttggcgcaccgctggcgatggaagcattaatggccttcttcctcgaatccacctttgtcgggctgttcttcttcggctggcaacggctgaataaataccagcacctgctggtgacgtggctggtggcgttcggtagtaatctctctgcgttgtggatattgaatgccaacggttggatgcaatacccgaccggtgcgcattttgatatcgacaccctgcgtatggagatgaccagcttcagcgagctggtctttaatccggtcagccaggtgaaatttgtgcacaccgtaatggcgggctacgtgaccggggccatgtttattatggcgatcagcgcctggtatttactgcgcggacgggagcgcaatgtcgcattacgcagctttgccatcggttccgtcttcggtactctggcgattatcggtaccctgcaactcggagacagttctgcgtatgaagtcgcgcaagtacaaccggtaaaactggcggcgatggaaggggagtggcaaacggaacctgcacctgcaccgttccatgtggttgcctggccggaacaggatcaagagcgtaacgcctttgccctcaaaattcccgcgctgctagggatcctcgccactcacagtttagataaacccgtgccgggtctgaagaatttgatggctgaaacctacccacgcttgcaacgcggacgtatggcctggctgttaatgcaggaaataagccaaggcaatcgtgagccgcatgtgttgcaggcattccggggactggaaggtgacctgggctacggcatgttgctctcccgctatgcgccggatatgaatcatgtcacagccgcacagtaccaggcggcgatgcgtggcgcgatacctcaggttgcgccggtattctggagtttccgcatcatggtgggctgtggttccctgctgctactggtgatgctgattgcgcttgtccagacgctgcgtggcaaaatcgaccagcatcgctgggtgctgaaaatggcgctctggagtttgccgttgccgtggattgcgattgaagccgggtggtttatgaccgagtttggtcgtcagccgtgggcgatacaggacatcttaccgacatactccgcgcactccgctttaaccacaggacaactggctttcagtctgatcatgatcgtagggctttacaccctgttcttaatcgccgaagtctacctgatgcagaaatatgcccgtctggggccgagcgcgatgcagagtgaacaaccgacgcagcaacaggggtaaaggagaaaatcatgtttgattatgaaacattgcgcttcatctggtggctgctgattggcgtgatcctggtggtctttatgatctccgacggatttgacatggggatcggctgtctgctgccgctggtggcgcgtaatgatgatgaacgccggatagtgataaacagcgttggtgcacactgggaaggcaaccaggtctggttgatcctcgctggtggggcattatttgccgcctggcccagagtgtatgcagcggcgttttccggcttttatgtggcgatgatcctggtgctgtgcagtctgttcttccgcccgctggcctttgattatcgcggaaaaatcgccgatgcacgctggcgtaaaatgtgggacgccggtctggtcatcggcagtctggtgccgccggtagtcttcggtatcgccttcggcaacttgttgctcggcgtgccgtttgccttcacaccgcaattacgcgtggagtatctcggcagcttctggcaactgctgacgccattccctttattgtgcggattgctcagccttgggatggtgattttgcaaggtggcgtctggttacaactgaaaactgttggtgtgattcatctgcgtagtcagctggcgaccaaacgcgctgcactgttggtgatgctgtgctttttgctggcgggttactggctgtgggtcggtattgatggctttgtactgctcgcccaggatgctaacggtccttccaatccgttaatgaaactggtggcagtgctacctggtgcctggatgaataattttgtcgagagccccgttttgtggatcttcccgctgctgggattcttctgcccattgctgacggtgatggcgatttatcgtggtcgcccgggttggggatttttgatggcaagtttgatgcaatttggcgtgattttcacggcaggcatcacgctgttcccctttgtcatgccgagtagcgtgagtccgatctccagcctgacgttgtgggacagtacttccagtcagctgacgctgagcattatgttggtaatcgtgctgatatttttgcccattgtgttgctctacactctctggagctactacaaaatgtgggggcgcatgacaacagaaactctccgccgtaacgaaaacgagttgtactaaggagcagaaacaatgtggtatttactttggttcgtcggcattttgttgatgtgttcgctctccacccttgtgttggtatggctggacccgcgtctgaaaagttaacgaacgtaggcctgatgcggcgcattagcatcgcatcaggcaatcaataatgtcagatatgaaaagcggaaacatatcgatgaaagcgatcttaatcccatttttatctcttctgattccgttaaccccgcaatctgcattcgctcagagtgagccggagctgaagctggaaagtgtggtgattgtcagtcgtcatggtgtgcgtgctccaaccaaggccacgcaactgatgcaggatgtcaccccagacgcatggccaacctggccggtaaaactgggttggctgacaccgcgcggtggtgagctaatcgcctatctcggacattaccaacgccagcgtctggtagccgacggattgctggcgaaaaagggctgcccgcagtctggtcaggtcgcgattattgctgatgtcgacgagcgtacccgtaaaacaggcgaagccttcgccgccgggctggcacctgactgtgcaataaccgtacatacccaggcagatacgtccagtcccgatccgttatttaatcctctaaaaactggcgtttgccaactggataacgcgaacgtgactgacgcgatcctcagcagggcaggagggagtattgctgactttaccgggcatcggcaaacggcgtttcgcgaactggaacgggtgcttaattttccgcaaagtaacttgtgccttaaacgtgagaaacaggacgaaagctgtagtttaacgcaggcattaccaagcgaactcaaggtgagcgccgacaatgtcagtttaaccggtgcggtaagcctcgcaagtatgctgacggagatatttctcctgcaacaagcacagggaatgccggagccggggtggggaaggatcaccgatagtcaccagtggaacaccttgctaagtttgcataacgcgcaattttatttgctacaacgcacgccagaggttgcccgcagccgcgccaccccgttattagatttgatcaagacagcgttgacgccccatccaccgcaaaaacaggcgtatggtgtgacattacccactagtgtgctgtttatcgccggacacgatactaatctggcaaatctcggcggcgcactggagctcaactggacgcttcccggtcagccggataacacgccgccaggtggtgaactggtgtttgaacgctggcgtcggctaagcgataacagccagtggattcaggttagcctggtcttccagactttacagcagatgcgtgataaaacgccgctgagtttaaatacgccgcccggagaggtgaaactgaccctggcaggatgtgaagagcgaaatgcgcagggcatgtgtagcttggcaggttttacgcaaatcgtgaatgaagcacgcataccggcgtgcagtttgtaatgcataaaaaagagcattcagttacctgaatgctctgaggctgatgacaaacgaagaactgtctaatgcgtagaccggaaaaggcgttcacgccgcatccggccactttcagtttgcaatacgtacgcttgagatcaggattgtctactttgagtataacatccttgtgaaatctccctttcctcataccgcttgcactatatactgcgggtaggaaaggcgcgcagagggaaatataagattgttaactatccccctctggaaatacgacttgtgagcataagataaatcttagcaaaatacaaattaaagataaggaaattgttacgaaagctattaattattgttggtaatatagtttcaagtggtactataactggctgttaaatggcatttataactattaggtgcagagatattcgcttaaatggattagtttctttgtggaaaagtaactgatgttataatgtatgatgttgactatttcactattccaataaaaccagtcagctttaaacaagcagcgtcatattaagagagataaacatttgccgctgttggtcctcgcaggccatttacgcggcaaaattccacacgtaatcctggtataagcacttctgcgtcgcggggagtgaatgcggaaatatggacctgaacttctttacgaccgtcggaggggataatgaatcctttgccgcttttgcgatcaaaggttttgacaattcctgtcattttacgggacaaacaaattccttactgaaaatactgcgctgcactatacggggttaataaaataaagccagcgatatttaagaccgccggacggctaaaataaaatttgcttaatctcaattatcatgcgttaatagctgcgtcggtttgaaagacagacagcatacaaagtagtttactaaagcagttctcattatcaggcattatccccttcttttgagtctctctcctgaacactaagtagtttctgtattaaagccctgtttgccgaaaggcccaaaatgaaggaagtaaaatatgtctaataaaatgactggtttagtaaaatggtttaacgcagataaaggttttggctttatcactcctgatgatggcagcaaagacgttttcgtccatttcaccgccatccagagcaatgaattccgcacgctgaacgaaaatcagaaagttgaattttctattgagcaggggcaacgtggccccgcggcagcgaacgttgttacgctctaaggttgccattattactcaacatctccatttccgctgtccatgttgtcatggttcacagtaccgcacatcggcattcgatgtgacggagcgaaaccctttgggcgctaagtgtattttttgtaaatcgacgatgatcacctttgataacgtcgcgctgcaaatacgcactgaccatgcgccgctggattagtcaaaataatatcaggctccctcgtggagccttttttatatctgccttatttttcttcaacgctgtatgtatagtaagcgataacctgttgattattgaatctttcggggagatggcttataacatttcttacctgaccagggtaccgggaaccaacaccttactggcgtgttgctgtcttttaagaccagaagaggttaacagtgaatattgaagagttaaaaaaacaagccgaaacggaaatcgccgactttatcgcgcaaaaaatcgccgagctgaacaagaatacagggaaagaagtctctgaaattcgcttcaccgcacgagaaaaaatgaccgggcttgaaagttatgatgtcaaaatcaaaataatgtgattttgtgaacatcaccccgtgcgaggtgatgttccgcttgttgctaatttagtgaccaatcattggcgcttgtggaattaagcgtcggtacaattcctccggcaccgggctttgccatactcccgcatacattgcgtaaccaatcaccgcaaacataatccccagaaccagtagcgtcattaaccagccagacaacgcaaaggcttttttatttgccgcaggtttttgcagactaaaggtcaatgtactggctaccggacaactctctacgcaagtcatacagccggtacattccactgttcgtacctgaattaatttatcgaccgggatccgacttgggcaattttttgcgcatttgccacagtcgatacaactttcggcattgcgacgaatcttaaacgggctcaataggctaaccacgcccatcagcgcgccatatgggcaaagataacgacaccaggcatggcgaataaacaggctggcaatcagcaaaacggtcacgctgattaatgtcgcggtccccatatgacgaaagaaatcgagcattttaacgtccatcaccacgctgtaggggctcaacataaaatagtgaatcgcctgagcgggcatcaataacgcgatatagataaaaaaactcaacagcaaatacttcacgccgcgcagaggaatatccagccagcggggaaggacacattgccgaccaaacagtttgttaccgagatcgccgattaattcagaaagcgtaccaaccgggcataaccaactgcaaaaggcctttttgagtaatagactgatgacgataaaagcgaccaataacagcatcgcggcggcgtggacggacggtaactgacctgttacaaggctatatttcagattcatcagcccggcaatcggtagccagccttcgatacctcccggtctggcgacaaatgtcgtgctacttgccgtttcgtaatagcgcacccaataccagaacgtgatggcaatataaatattcattgccaacagtaataattgcgtcgctttacgccaggtcgtggcattacgccagtcattccacggtaatttgccgcccgtcgtgcctggccgccgctgccagcgggttcttttattctctgccatgattttgccagtccgttaagttgtataccaaatgccactattctagttgttcttaactggctgatattgattcaaatcgcgttcaggtctttcttatgcaaccatgcttccagagcggcaacactgcgtgtaatttcttcgtgtggaaggggggcagataatggctgctgctccagttgtgcgcatagctggctggcgatatgcattcccagactgctgcaactgctttttagctgatgcgcggcacgctttattttctcgctatcctgactggcgcgggcaatgtcgatttcatcgagaagcggcagggcatgttgtgtaaataataccagccattcgtggatcttctccgtccccattaactgagcatcttcattgagttggcttacatccaggctttgatcattattgacttgcagttggagatagtgcgccagtaactgaccgagcacttcacgcggcaccggtttagggataatcccgcggaataaactactggtacgctggcgcagcgtttcgtcaatgacatgggcgctaaagccaatcaaaaccaggctcggatattgctgtgccagttgtcgggcaagcgtaatgccgtcgatatccggcagatcaaaatccaccagtgcggcagcaaacggttcgctattttgcagtgtctctaaagcctgcgcggcattgccaacagcaacaatctgcgcaccactggttttcagcatctcaatggtaattcgctgggttagcgggttatcttcaattaacagcaaacgtaaaccgtcaagacgcaccgcctgattgactgtttttggcacgggtgccgtggcaacacgtaacggcaagcgtaaacaaaaacagcttccaacctccggcgtgctggtggcgctcagttcgccgcccatcgcctgggccagacggctactgatagtcagtcccagcccggtgccgccgcgtttgccgcttacctgcacaaatggctggaagatttctgccagtttcgcgggatcaataccgcagccgctgtcttccacttcgaccagccattgctcgccatcagtgcgactacgcaggataatgtacccttcgtcagtaaaacgcagggcgttgctcaacaggttggttataacctgacgaatacgtcgtggatcgcccattaacgcgcacggcatatcatcggcaattgccgttgccaggcgaatcgggcgacctttcacccgtccgctcattaattgcagggtactttccagcagcgggcgcggttcaaagggctcatcgctgacgctaacattcttgccacctgcttcgatagcggaataatcgagaatatcgttgaggatggtcagcaagctttcaccagagtcagtaattgcccgcaaatcatcacgctgggcgttaagtgcggggttatctgccagcagttgagcagtgccgagaataccgtacagcggtgtgcggatctcatggctcatcgccgccagaaacgcgctttttgcctggctggctttttctgcttccgcccgtgcctgtcggtgttctatcaccagttcctgcaattcagctgtacgcgctttgacctgcgccgccagctgttcgcggtggcgattcagtgcatgaacattgctgcgaaacgcatccatcagccgcccgatggtatccagctcccgtacgccagcggtttccgggaaaggggagtcaatatcaccgtccagcagccgttgcagcgcctgcgtttgttcggcaagtggacgcgtgacactgcgataaaccacgcgccagaggatcagaatcagtgcgcaaagactaaccatccccagcaataacaggctgtattgcccgcgtgcactcgctttttccagatgcgccagtccgtgctgattacgcagctcaatggtgtcgaccagctgactgacttcgctactaaactgcgcgaactgggcgatgttattttgtgcgagagtttgtaggtgattgctgatttcactgtcctgctgatacagcgccagcaaatcgctatattggctaacggtagttaacgttgttgcgacctgcgcacgaacacccggatcttcaatgcgtatttgccgacgttgcagaattttcaccgcattattgagctgcttttccagcgttggtgcatttttctggatctgctccagccccagattcatcaccatttgctgcacccgcagagcgctaaggcgcagttcattcatctggttaacatactcaagatcgatatcaatcagccgatcgagtgcactttcagcagcctgacgctgatcttgttcgatcaaatcgtaaatcccggcctgggtcgctccagcggaagttgtcgcattattcgcctgaccttgcgccaggcgtgcgatctcatcggcggcagcgactatctgctgactgagttgctgttgttgctggcgcagttgcaaacgctgccccaccagttccccttgctgacgtaagctacgggagatctcctgctcctgttgttcaatagcggtggtatcaaaaccttgttcccgtaacgcttgcagcaacgcattaatcttcaggctttgtgcggtgagcattcgcccctgcgcctgccacatcttttcgttatcggcactggtcaggttctgcgcggcgaaaagttcccaggcgctggcttcgctcaactggcgcgccatattcatggtaggaatcaatgcctgagtgttgtctttttccacctggctgataaagcgcaggttgtaccatcccaccagggtactggtcagggttaacagcgccatcagggcaaagcccatccagagtcttcgggtcagggttaaattcacggtcggtgcactttaggtgaaaaaggttgagtcgcaaagcggaatgcatctagcataaagccttattattgatgaggctatcatgcgcgtactgctatttttacttctttcccttttcatgttgccggcatttagcgctgataacctgttgcgctggcatgatgcgcagcatttcacggtgcaagcctctacgccgcttaaagccaaacgcgcatggaaactgtgcgcgctttatcccagcctgaaagatagttattggttaagcttgaactatggtatgcaggaggctgctcgccgctacggtgtggatttaaaagtgctggaggcaggcggctacagccagttggctacccagcaagcacaaatcgaccagtgtaaacagtggggcgcagaggccattttgctcggtagtagcacgaccagttttcccgacctgcaaaagcaggtagcaagtctgccggtgatcgaactggtaaatgctattgatgctccccaggtgaaaagccgcgttggtgtgccctggtttcagatgggctatcaaccggggcgatatctggtgcaatgggcgcacggtaaaccactgaatgtgctgttgatgcccggacccgataacgccgggggcagtaaggagatggtcgagggttttcgcgcagccattgccggaagcccggtgcgtattgttgatattgcgcttggtgataacgatattgaaatccagcgtaacctgttgcaggagatgctggaacgccatccagaaatcgacgtcgttgccggaacggccattgcggcagaggcggcaatgggggaagggcgtaacctgaaaacgccgcttaccgtggtgagcttttatcttagtcatcaggtgtatcgcgggctgaagcggggaagagtgattatggctgccagcgatcaaatggtctggcagggggaactggcggttgagcaggccatcaggcaattacaggggcaaagcgtttctgataatgtcagcccaccgattttagttctgacgccgaaaaatgccgaccgtgaacatattcgccgcagcctgagtccagggggatttcgtccggtctatttttatcagcacacaagtgcggctaagaaataatcagcacacatcagcggctaagaaataaccttcaccatgttgcgtcaccagtaaatccgcgctgagtttatgacgtaaacgacgaattaacacatcgacggtgcgcaggtcagggttttccacccgacgcgcagaaagcatacgtagcagacgttcacggctgagaatttcgcccggattcgtcacaaatgccaccaacatttcatactctgcgcgggtcagtttaatcggctcgccatcccgctccagcgtatggcggctcacattcaggcaataaccggcaaagcgatagcagttgtcctgagtgtgcggttgagcttgtcgcgcgaggtcgattcgccagagcagatttttcacccgtactaccagttcgcgcagttccagcggtttggtgacgtaatcgtctgcgcccatttccagcccaacaatacggtcaatccgatcgctgcgtccggtaaccagaataatccccaccgtactgcgttctcgcagggcgcgggttaacatcaggccattttcatcgggtaagttgatatccagcagaattaaatctacgctctgattctgcataatttcccgtagcccagcaccgctcgccgtaacggaaacggtatacccctcctgagtgaagtaggattgtaatcgcgcctgggtaaccggctcatcttcaacaataacaatgtgatgtggcatcagagggttttactcattctgttcatatctgttcatattctgccgtaagccgttcatcctgaccagtgccgctgttcatatttgctcattaagatcgcttcactaaaccataattctacaggggttattatgcggaaactctggaacgcgctacgccgacccagtgctcgttggagcgtactggcgctggtcgcaattgggattgtgattggcattgcgctgattgtattgccacacgttgggatcaaagtcaccagcacaaccgaattttgtgtcagttgccacagtatgcaaccggtgtatgaagaatataaacagagcgtgcatttccagaacgcctccggcgtgcgagctgaatgccatgactgtcatatcccgccggatattccaggcatggtgaagcgcaaactggaagcgagcaatgatatctaccagacctttattgctcactccattgatacacctgaaaaattcgaagccaaacgcgcggaacttgccgagcgtgaatgggcgcgaatgaaagaaaacaacagcgcaacctgccgctcctgccataactacgatgcgatggatcatgcgaagcagcatcctgaagcagcacgtcagatgaaggtggcagcgaaagataatcaatcctgcatcgactgtcataaaggtattgcccaccagttaccggatatgagtagcggcttccgtaagcagttcgatgagctgcgcgccagtgctaatgacagtggtgacacgctgtactctattgatattaagccaatttatgcggcgaaaggcgataaagaagcctctggttctctgctgcctgctagcgaagtgaaagtccttaaacgtgacggcgactggctgcaaattgaaattaccggctggacggaaagcgccggacgtcagcgtgtactcacccaattcccaggtaaacgcatctttgttgccagcattcgtggtgatgtgcagcagcaggtaaaaacgctggagaaaaccaccgttgccgacaccaataccgagtggagcaagttgcaggccactgcgtggatgaagaaaggcgacatggtgaacgatatcaaaccgatctgggcttatgcggatagcttgtacaacggcacctgtaaccagtgccacggcgcaccggaaatcgcccactttgacgctaacggttggatcggcacgctcaacggcatgattggctttaccagtctcgataaacgtgaagaacgcaccttgttgaaatatctgcaaatgaatgcgtctgacaccgcaggtaaggctcacggcgataagaaggaagaaaaataatgaacaataacgatctctttcaggcaagtcgtcggcgttttctggcacaactcggcggcttaaccgtcgccgggatgctggggccgagtttgttaacgccgcgacgtgcgactgcggcgcaagcggcgactgacgctgtcatcagcaaagagggcattcttaccgggagccactggggggctatccgcgcgacggtgaaggatggtcgctttgtggcggcaaaaccgttcgaactggataaatatccgagcaaaatgattgccggattgccggatcacgtacacaacgcggcgcgtattcgttatccgatggtacgcgtggactggctgcgtaagcgccatctcagcgatacctcccagcgcggtgataaccgttttgtgcgcgtgagctgggatgaagccctcgacatgttctatgaagaactggaacgcgtgcagaaaactcacgggccgagtgccttgctgaccgccagtggttggcaaagcacggggatgttccataacgctagcgggatgctggcgaaagctattgccttgcatggtaatagcgttggtacgggcggagattactctaccggtgctgcgcaggtgatcctgccgcgcgtagtcggtagcatggaagtgtatgaacagcaaacctcctggccgctggtattgcagaacagcaaaaccattgtgctgtggggctccgatttgctgaaaaaccagcaagcgaactggtggtgcccggatcacgatgtttatgaatattacgcgcagctaaaagcgaaagtcgccgccggtgaaattgaggtcatcagcatcgatccggttgtcacatccacccatgagtatctggggcgcgagcatgtgaagcacattgcggttaacccgcaaactgacgtgccgctgcaactggcgctggcacatacgctgtacagtgaaaacctgtacgacaaaaacttccttgctaactactgtgtgggttttgagcagttcctgccgtatctgctgggtgagaaagacggtcagccgaaagatgccgcatgggctgaaaaactgaccggcattgatgccgaaaccattcgtgggctggcgcggcagatggcggcgaacagaacgcaaattattgctggctggtgcgtgcagcgtatgcagcacggtgaacagtgggcgtggatgattgtggttctggcggcgatgctggggcaaattggcctgccaggtggtggttttggttttggctggcactacaacggcgcaggcacgccggggcgtaaaggcgttattctgagtggtttctccggctctacgagcattccgcctgttcacgacaacagtgactacaaaggctacagcagcactattccgattgcccgttttatcgatgcgatcctcgaaccggggaaagtgatcaactggaacggtaaaagcgtaaaactgccgccgctgaaaatgtgtatttttgccggaactaacccattccatcgccatcagcagatcaaccgcattattgaaggcttgcgcaagctggaaacggttatcgccatagataaccagtggaccagtacctgccgctttgccgatatcgtactgcctgcgaccacgcagtttgagcgtaacgatctcgaccagtacggcaatcactccaaccgtggcattatcgccatgaaacaggtggtgccgccgcagttcgaggcgcgcaacgacttcgatattttccgcgagctgtgccgtcgctttaatcgcgaagaagcctttaccgaagggctggacgaaatgggctggctgaaacgcatctggcaggaaggtgtacagcaaggcaaaggacgcggcgttcatctgccagcgtttgatgacttctggaataacaaagagtacgtcgagtttgaccatccgcagatgtttgttcgccaccaggcattccgcgaagatccggatctcgaaccgctgggcacgccgagtggcctgattgagatctacagcaaaactatcgccgatatgaactacgacgattgtcaggggcatccgatgtggtttgagaaaatcgaacgctcccacggtgggcctggcagccaaaagtatccgttgcatctgcaatctgtgcatccggatttccgacttcacagccagttatgtgagagcgaaacgctgcgtcagcaatatacggtagcgggtaaagagccagtattcattaacccgcaggatgccagcgcgcgcggtattcgtaacggtgatgtggtacgcgtctttaacgctcgcggtcaggtgttggcaggggcagtggtttctgaccgctatgcacccggcgtggcacgaattcacgaaggggcatggtacgatccagataaaggcggcgagcctggtgcgctgtgcaaatacggtaaccccaacgtgttgaccatcgacatcggtacaagccagctggcgcaggcgaccagtgcgcacactacgctggtggaaattgagaagtacaacggaacagtggagcaggtgacggcgtttaacggccccgtggagatggtggcgcagtgcgaatatgttcccgcgagccaggtgaaaagttgaattaacccgcgtcgcaggtgaaatcatgaccacgctgacagcacaacagattgcctgtgtttacgcctggctagcgcagttgttctcccgtgagctggacgatgaacaactgacgcaaatcgccagtgcgcagatggctgaatggtttagcttgctgaaaagcgaaccgccgctcactgcggcggtgaacgagctggaaaaccgtattgccacgctgacagtacgtgacgatgcccgtctggaactggccgcggacttttgcggcctgtttctgatgaccgacaaacaagcggcgctgccgtatgcaagcgcctacaaacaggacgagcaagagattaaacgcttgttagttgaggcagggatggaaaccagcggcaatttcaacgaaccggcagatcatctggcgatctatctcgaattgctcagccatctgcattttagcctgggagaggggaccgttcctgcgcgaagaatcgacagtttgcggcaaaaaacactgacggcgctgtggcaatggttaccagagtttgttgcgcgttgtcgtcagtatgacagctttggtttttacgcggcactaagccagttattgctggtgttagtggagtgcgaccaccaaaacagataacgtcgtttgtgcgcctgaaaagacgcgtttagcgtcgcatcaggcattatggcgcagttgccggatgcggcgtgaacgtcttatccggcccacaggaactgtaatctttgtagaccggttaagatgcgtcatcgcatccggcaaacacacatcacggatgagctacaaaccgggaaagccgctggcgcagcaggcggttttcctgcttcaggtgcgcaatatcatccattaacgtcagcgccaccgcgatccccggccagtccagagccagttcatgacgcaggcgtaccgcgcgttgcaccacaatggcggcatggtcgtcaaatacccaggttgtttcctggatctcacgcggttcaaccacccccaaaccgacaatttcattcaactcctcttcagagatgccggtatgcaggcaaaattcggtaatagtaaaagtcaccgtaacattagccattatgctttcccccaatctttacgtggatcaaaagagctctgggcgtctgccagttgctgccacagcgcggcagtgttttcatccggtttcggcggcatcacgattttcagtaccgcatacagatcgccggtctgttttttgctcaccagacctttgcctttaacgcgcaatcgttgcccggcctggctgcctggcgggatagtcagcaaaatgctttctttcagtgttggaacggtgactttagcacccagcgccgcttcccacgggctaaccggcaccacaatttccagatcctggccgacaatatcaaacagcggatgtggcgcaatatgaatcaccagccacaaatcgccatttggaccgccgttttcgcccggcgtcccctggcctttcagacggatgcgttgaccattgccgacgcccgccgggatcttcacattcagcgttttcggaatttcctgttcgatcatgccaaaggcgttataaaccggcaggttatagctgatggtacgcttatgctcagtaagcgtttcttcgaggaataccgccacttcgatttcaatatcgtggccgcgtgtggcggggcgttgacggctctggcgggcatgctgaccgaaaatactgctgaagatatcgtcaaaatcttcggcgttaaaactctgaccgtcgccatggtggaactgacggttaaattgcggatcgttgcgatgttgccacatctgatcatactcagcgcgacgttgttcatcacttaacacttcccaggcttcagcgacctctttgaagcgggcttcggcatccggttctttgctgacatcaggatggtatttgcgggcaagtcgacgataggcggtcttgattgtcttgagatcgtccgtcggtttcacgcccatgatggcgtaataatcctttaattccatagcgttatctcgcgtaaatcaacacaaattgaaggaacccctgtaaggtaactcctataagtgtagggtaatcctcaaaatttcatatgccaacacagaatatgttattgaaatcatcgcggagaggaggtcgccatcaagatgggttgctgaacatattttaaacaggtgaaaaagggtgagcgatttttgatagttgaaccaggcactttaagtttaactagggcgtcattatttattaaattttatagacgctatatatgggtagtaatatacatggaattagttgcactgcaaataattatttgaaacaggcctggaacgatataaaaaatgagtacgaaaaaaatcaaacatatagtatcacgctttttgaaaacacactggtgtgttttatgcggttatacaatgaactcagacgtaaagtaaatgaagaggatactccatgtctggaatgtgaaagtctagaaaaagaatttgaggaaatgcagaatgataatgatctaagtttatttatgagaatattgcgtactaatgatacacaaatttatagtggggttagtggaggtattacatatactatacaatatgttcgagatattgatattgttagagtgtccttgccgggcagagctagtgagtctatcacagattttaaaggttattattggtataactttatggagtatattgaaaacattaatgcgtgtgatgatgttttttctgagtattgttttgatgatgaaaatataagtgtccagccagagcggataaatacgccgggaatatctgatttggattctgacattgatttgtctggtatatcttttattcagcgtgaaactaaccaggcattaggattaaaatatgctcctgtagatggcgatggatattgtctgttaagagctatactggttttaaaacaacatgattatagttgggcgctggtcagttataagatgcaaaaggaagtttacaacgaattcattaaaatggttgataaaaaaacgatcgaggctcttgttgatacggcattctataatctcagggaagatgtaaagacgttatttggcgttgatctacaatctgacaaccaaattcaggggcagagtagtcttatgagttggagctttctgttttttaaaaaacaattcattgatagttgcttgaataacgaaaaatgtatcctgcatttacccgagtttatatttaatgataacaagaacttgcttgctttagataccgacacgagcgataggattaaagcggtgaagaattttcttgttgttcttagtgatagcatttgcagtttatttattgttaatagtaatgtggcaagtatctccttggggaatgaatcctttagtacagatgaagatcttgagtatggttatttaatgaacactggcaatcattatgacgtttacctccctcctgaactttttgctcaggcttacaagttaaacaataaggaaatgaatgcgcaactcgactatttaaatcgttatgcaatttaatggcaaaggcatatgctaaaaaccattgttattagtctcacacttttttattggtaaatattgtctctgtattggtaacgccgcagatattctgtttagccacaggtgcaattatcagcggcgtacgcgaggcaggggctaatcaggcatagtttgcgtcaaaccttgcctgtttttgaagatgtatatagaaaaacaggcgttcaacaagccattttgcgaacctgttcccggaaaaaagtcatatttctgtcacactctttagtgattgataacaaaagaggtgccaggaatgaacaaaacgctaatcgccgcagctgtggcagggatagttttactcgctagtaacgctcaggcacaaaccgtaccggaaggctatcagctacagcaagtgctcatgatgagccgccataacttacgtgcgccgctggcgaacaatggcagtgtgctggagcagagcacgccgaataaatggccagaatgggacgtccccggtgggcaactcaccaccaaaggtggcgtgctcgaagtgtatatgggccattacatgcgtgaatggctggcagagcaggggatggtgaaaagcggggaatgcccgccgccgtacaccgtttatgcctatgccaatagtctgcaacgtaccgttgcgaccgcacagttctttattaccggcgcattcccggggtgtgatattcctgtgcatcaccaggaaaaaatgggcactatggacccaacctttaacccggtgatcaccgatgattccgccgcattcagtgaacaggcggtggcggcaatggagaaagagctcagcaaactccagcttaccgacagctaccagctactggaaaaaatcgttaactataaagattcccctgcctgtaaagagaaacaacagtgtagcctggtggatggcaaaaatacctttagcgccaagtatcaacaagaaccaggtgtttccgggccgctgaaagtcggcaacagcctggtagatgcgtttactttgcaatattacgaaggttttccgatggatcaggtggcctggggagaaatcaaatctgaccagcagtggaaggtgttgagcaagcttaaaaacggctaccaggacagcctgtttaccagtccggaagtggcgcgcaatgttgcgaaaccgctggtcagttatatcgacaaagctctggtcaccgatcgcaccagcgcaccgaaaattacagtgttggttgggcacgactccaacattgcctctctgttaacggcgctggatttcaaaccgtatcagttgcatgaccagaacgaacgcacgccgattggcggcaaaatcgttttccagcgttggcatgacagcaaagccaatcgcgatttgatgaaaattgaatatgtgtatcagagtgcggaacagttacgtaatgccgatgcgttaaccctgcaggcacctgcgcagcgtgtgacgctggaattaagcggttgcccgatagacgctgatggtttctgcccgatggataagtttgatagcgtgttgaatgaagcggtgaaataacagaaaactcccccgcgagaagcgggggagtcgctggttaaacgtttttacgttcgatggtctgttcgccccaaaaaaggctatctttatcggtcttagcaaaggctttgactaacacttcatcactaccttcttcccaaatcttttccgccattttttcgtcgtacccggcgacttcgaaaatggcctcggctatttccgggctcgtattgcgcagagatgcccattcaccgacgtgatgagctttcgcttcttgagttggcatgcgtatcctcctgttgaagattagccgttaagtttaactgccagacctgcgacatattccccttgataacgagcaatagacagttcttcctggctgggctggcgactaccgtcaccgcctgcgatggtggttgcgccgtacggcgtaccgccgcgaacctgactaacgtcaaataattcctgcgctgcgtagccaatagggacaattaccatgccgtgatgcgcaagggtcgtccaggtggatgtgatggtttgttcctgaccgccgccagtaccggtggaactaaagacgctcgccagttttccgtatagtgcgccggaagcccacaggccgcccgtctggtcgaggaaggtacgcatttgaccggacatgttgccaaagcgggtaggtgtaccaaaaataatggcgtcgtaatcggccagttcttgcggggttgcaaccggtgcagtttgcgttttaccgcctgctttttcaaataattgcggcggcatggtttccggtacacgcttaacgacaacttcagcgccatccactttgcttgcaccctcagcgactgcgcgtgccatcgtttcaatatgtccgtacatggaataataaagcaccagaactttagccatttctaaccactcctcgtgttatctctattccgtagcgattcgctaccacttatttaaagataagacgtccttttcagagtgcaaatttcacaaccacttatttgatttataacaactttcacaagcacgtaattttgtcgcaaaatgacacatttttatctcatcgcgtttttttaatcataagagcggcttatggataattattggagatgatatctattctcgctaagaagctgttgcaggatattaccaaacgcgggtctgcccgcgtcagttcactaagcttagtcccacgtagcgaaaatatggcagccgccatacgccgcgttaattctatgcaatatgatgtctatacccagacggaggtcagtaatggcaaaccatcgaggcggttccggcaattttgcagaagaccgcgaaagagcaagtgaagcaggtaaaaaaggtggacagcacagcgggggtaatttcaagaatgacccgcagcgcgcatctgaagcaggtaaaaaaggtggtaagagcagtcacggcaaaagcgacaactaaccgggctaatcaatgacgaatgcatttttgtctgtagctcgtcaaaaagccatcaccgccggttacccggtggttgatactgatgacaaatgtaagcttgcctgatgcgcgatgcttatcaggcctaccagaagattgcaatatattgaatttgcactgttttgtaggccggataaggcgtttacgccgcatccggcatgaacaatgcgtacgttgtcaacaatctgcaccgccggtaaccccggcggttttctgtttatggctcctgatgaacaacttctggcggtggaacgtcaaccaactttctgcttaacaacgcattgagtaaaatcgcgccaaaggttgctgtaccaatccctcccaacgtaaaaccgcccagcgtgagagcaaaatcacccgcgcccagcactaaggttactgcgaccataatcaaattaccgttctggcttaaatcgacacggttttgtacccatatccttgcgcctgcgacggcaatcagcccgaacacaacaatacttgcaccaccaataaccgcggccggaatggtatgaatcagcgcaccaaatttcggactaaagcccaacagcatggcgatgacggcagcagcaacaaacaccagcgtgctgtagactttggtcacggccatcacaccgatattttcagcataggtggtcacgccgctaccgccgacagagccggaaagcatcgttgccagaccatcgcctacgaatgcccgccccatatacgggtccatattgcgtccggtcatcccggcgactgccttgagatgacctaagttttccgccaccagaatcaccgccacgggcgcaatcagcatcattgcctgaccattaaaagcaggagtggaaaaatgtggcagaccgaaccaggcagcatggctgacgagagtaaaatcgacggcttttcccagccctaaaacgttggtcatcacgccatacagcagacaggcgacaattaatcctacgagaatcaataaccgctggatcatgccacgggtaaacaccgccaccagcccaatacacagcaccgtcattaccgccatccagctatcaaaggcgctagcgcttacacttttcactgcgataggcgctaagttcaggccaatcgccatcaccaccgcacccgtcaccaccggcggcatcagtcgttcaatccagcgcgtaccgattttcatcaccaccaggccaatgacggtataaaccagcccacaggcgataatcccgcccagcgcaatgctgatattcgggttaatgccctgaccgttaaagcccgtcgcggcgatcaccacgccgacaaaagccgcgctggagccgagataactggggacgcgcccgccggtaataaagaaaaacagtaacgtgccgatcccgctcattaaaatggaaagattgggatccagccccatcagaatcggcattaacaccgtcgcgccaaacatcgccaccgcgtgttgaacgcccattactgccgtctgagcaaacggcaatcgttcatccggcgcgaccacgccgctctctgtagaggtgctttttaactgccagtgaggaaaaccgaacattgccatcagctgtctccttaaggaggttaacaagcagggcgcatcagcgcgtgataactgcgatcgaaccacaccagcccgtagggtgtggtgtgacgatgaatcgcttcgatggcgcaaaacagaatgtcgtgggtgccgacgctcaccacctggctgatacggcagtcaaagctaaccagagcctcttccagttgcgggcatccggtcacccccgtctgccagcgggcggcggcaaagcggtgttccatgggcgttttgccgccaaaaaggttactaagcggctcctgcccggcgctaagtgtatttacacacagcgttcgattttcattgaatgccggccagacggacgccccacgattcaggcacaccagtaatgtgggcggcgtatcggtcacactgcagacggcgctggcggtgaacccggcgcgcccggctggaccgtccgtggtgataatattgaccgccgcgcccatgcaggacatcgcatcgcgaaaagtttgttgatcgacaatgttcatagtttgctccttacaacagcccgcaggcttcttcaaaggacagacgtggcaggcgcgcataaagcttgctgctatcgccatagccgatattaatcagcagattgctcttcagcgtgctgcccgtaaaaaaggcgtcgtccacgtgttgacggtcaaagccgctcatcgggccggtatccagtcccagcgcccggcaggcgacgatcagataggccgcctgcatggaactgttgcgaaacgctgtttcttcggcaagttgtgggctggaggtaaaccaactgcgggcatcaccgtggggaaacagtagtggtaaccgttcataaaattcactgtcccaggcgacgatagcggtgacgggcgcggtcagggttttttgcagattgccgctggaaagtgccgggcgcagacgttcttttccttctgccgtgcgggtaaacacgatccgtgccggagaacagttagcacttgtcggcccccatttcatcagggcataaatctcccgtaacgtctcatcgctgacgggtgtctcccgccagccgttgtgagtgcgggcatcggtgaacagggtgctaagcgcacctgggctaacggcttcgttcatagcaattccttacagggcggcttcacggtgatgtaacaggctggcaagcccgttgagtaacagagcattaaacgtttcgggatcggtcacgttgcaggcgtgtccgccatagggcatcaccattttctggctatcgggcagggcggcatgaagttcactggaacatgctgttggcaccagcagatcatcactggcgcagatgatttgcaccgggcagcggatgcgatccgcatggtgactaaagtcagcgcgtttgagggcgttaagtcgacgcagtaaattatttttgccctgaaaatgcgccagtgccagcgcgtcttctgcctccaggcgaggtgcgcgggccgccatccagtcggcgggatagaggaacaacggctgcgcttccacccatgcctgcgcgccgccgctatacagtaatcgttcgcgaacctgaaaacagcggcgcgtatgggcgtttattcgtagccagccgttaacgctgatcagcacagttacgctcgcgggataatccagcgccagctgcattcccaccagcgcaccgagcgcatggccgaccactgcgtaatgctcaatccctgcggctaccagcgcctgatgcagttccgctgccatctgggcgatactgtaatcttctgccagcgtgtcgggattattgccggtgccgcgctggtcgtaacagactacctgatactcctgctccagcaccgccagttgcggtaaccagtaactgccgctacccccaagaccgctaatcaacaccactacgggcgcatcagcataagggggaggactgagactaagtttcatcgcggcctcacttggcgatatgcgcaattgtggcgatttccaccagcgcgtcaggttttaccagtccgcactgaatgcagaatcgcgccggtttatcacccggaaaaaactcggcgtagatttcgttaatcgcggcgtaatttttccagtcggtaataaagatgctgttgaaggtcacatccgccatcgtgccacccgccgtctcgatcaccttgcggatagtttccagaacgtggcgggtttgcgcctttgggtcatcggcaaacagcacgttattatgttgatcaaaagccagcgtaccggagacatacaccacgccatcagccagcgtgccgggaacgaagggggccagcggtgcgctgctgccagcgggaataattacggattttggcatcgttaaactccttaagcgatatgagcaaaggacgtgggagaaagcgcgtcgcagaatgtttcgacgtcgctgacccagccaaaaaaggtttcgatattgaacaacgcggctttctgcgcaaatttcggccccgcctggtgagttgcgtcttcaagcaccacgccgaaatactccagaaaaaagccgtcgcgtagcgtgctttcgacgcagacgttggtagcgatgccggtgaaaaccagatggcgtattccgcggctgcgcaaaatgctgtccagcggcgtattgaagaaaccgctgtagcgcggcttcggcagcacaatatcgccaggctgcggcaccagttcatccaccagttgataatcccaggagcctttcgccagcaatttcccctgcagctgcggctgcttacgcatggttttcagggcgttgcttttatgaaaattcggactgccgggtccgccagcctcgacatactgttcatcccagccattttgaaaccagatgatcagcatccctgccgctcgcgctgcggtcacggcggtttgaatgttggcaatgaccgggcgagtggtactgacatcaaacccggcgagatctaagtagccgcctggcgtggcataagcgttttgcatatccaccacgatcagcgcactttgctgcggatcgaaggtaatggcttccggtcgagcggttaaggtcgtcatcatgccacctcctgagtcagcgcaggtagatgggcgcggcattgcatcagtggttgaatgcgctcgccgaaggtttcgattccgctcagaaaatcgtcgaaggttaacagcacgccttcggcaccaggcacgcttgcgacttcatctaacatgcgcgcgacactggcgtaagaaccgactaacgtccccatattgatgtttaccgcgctagtgggatcggccatctgacgaacgttggtgtcagtaccggagcgggtatctttctgactttgttcggttagccagcttaacgcctcttcatccgcgcccgctttgtagtgttcccatttggcgcgagcggcatcgtcggtttcatcggcaatcaccataaacaacacataagagccaacgtcgcgtccggtttgctctgcggcctgtttcatccgcgcagcggtcggggcgaaagccgtgggtgtatttacgcctttgccgaaacagaagttgaaatcggcataccgggcggagaacgccatgccagcgtcgctttgcccggcgcagatcactttcatggggacactcggttgcggactcacgcgacaatcattcatggtgaaaaaatcgcctttaaaatcgcttttccccgtgccccacaggtcgcgcagcacctgaacatattcggtgagatagtcgtaacgacgggagaaatagtcatcgccaggccagatacccatctgctcatactcgggcttttgccagccagtcacgaggttgacgccaaaacgcccgccagagatggagtcgatggttgcggccatacgggcgacgattgccggaggtaacgttaaggtggcagcagtggcgtaaatctgaatgcggctggtcacggccgccagccccgccatcaaggtgaagctctcaaggttgtgatcccagaactcagttttgccgccaaagccacgcagtttgatcatgctcagggcgaaatcgaaatggtagtgctccgctttttgcacaatggctttattcagttcaaaggtcggcatgtactgcggcgcgtgggtgctaatgagccagccgttgttgccaataggtacgaatacgccaattttcatcatcaacctctcttcgtctcgtaaagtgaaagtcagacggggcgctgcatcctgcatatccttttcagccgcgtattggcttgtttgcaaagcggatgccagtttttaaaaagttaatgttattaatctgttaacattacgttatctaaaatatctggtaaaaagtggactaaacggtcaaaacagttgcacataaaacatgcatctgtgcgcgatgagagtgcagaaggtcgaggccgggcgggggttttgctatcctgttgccaatctacaagaggggagagcgcatgacgcaaggcgcagtgaaaacaacgggtaaacgtagccgcgcagtaagcgcgaagaaaaaagcgattcttagcgcagcactggacacttttagtcaattcggttttcacggcacaaggctggagcagatcgcagagttggcgggtgttagtaaaaccaatctgctgtattactttccgagtaaagaggcgctgtatattgccgtgctgcggcagattctcgatatctggctggcaccgttaaaagcgtttcgtgaagatttcgccccgctggcggcgatcaaagagtacatccgtctgaagctggaagtcagtcgcgattatccgcaggctagccgcctgttctgtatggagatgctggcaggcgcgccgctgttaatggatgaactgacgggcgatttgaaggcattaattgatgagaaaagcgcgctgattgccggttgggtcaaaagcggcaaactcgcgccgattgatccgcagcatttgatttttatgatttgggcttccactcaacattacgccgatttcgcccctcaggtggaggcggtgacaggcgcgacgttgcgcgatgaggtatttttcaatcaaacggttgaaaacgtgcagcggattattattgaggggattcgaccacgttaaagatgccggaggaggttgtaacatcctccggctacctgtttaacctatagtcattaagctggcgttaccgccagcggcagcggtattcacactcaggctacgctcgatatacagccgttccagaaggatattgctttcgccacgggcaaaaccctgcacgctaacaattgtgccatcccgcgcggcaactgcttcacacaatgcgcgaagctgatcgctatcaccgtggaagatcaccgcatcaaacggttgagcggttatattttccgctttcgccagttgaatacgttcgctgactgcgcttggcaatgccttcactaactgacgatgcagcgcgtcatccggccacagtacctggctgcccaccgccagcacggcggcgagctgagtcagcgcatcctgctcatcatcggcaatacacaacacgcgctcacgcggcagcagcgtccaggtgttgcgttcacccgtcggccccggcagcaatcgttgtgttcctgcctgcgccagctcgccatattgcgtacataacgcctgcaattctggacgatttgctgcccattcccgcagtgcatttagcggctgagtcaatgcggctttcaactgcgcatcgaccggatactttgcatcctgacgcgcgagcgtcactgccagcgcactttccgggcgattcgccagcagacggtagagatagagcggaccgcctgctttcggcccggtaccggacaacccttcgccgccgaacggctgcacaccaaccactgcgcccaccatattacggttaacatacaggttaccaacatgggcgctgccagtgacctgggcgatggtttcatcaatgcgcgtatggacgccaagcgtcagaccataaccggaagcgttaatctgctcgatcagctctggtagctggttacggttgtaacgcaccacatgcagcaccggaccaaagacctctttttgcaattcggcaaagtcatccagttcgatcagcgtcggggcgacaaaggtgccgctttgccattcacgggcatcttcgctgttttcccgcaccgcctggaacaccggacggcctttgctacgcatggtctgaatatggcgctcaatattggctttcgcttcgctatcaatcactggaccgatatcggtggtcaggcgacccggattacccatccggcattcggccattgcgccgcgcagcattttcaacgtgtggtcggcaatctcatcttgcaggcacagcacgcgcagcgcgctacaacgctgacccgcactgtcgaacgcgctggccagtacatccacgacgacctgttcggtcagtgcactagaatcgacaatcatcgcgttcatgccgccggtttcagcgatgagcggaatagggcgaccctgagcgtccaggcggctggcgatattgcgctgcagtaacgtagcgacttcggtactaccggtaaacatcaccccgcgcacgcgatcatcacccgtcagttgcgcgcccacggtttcaccccgacctggcagcaattgcaccacgcctggcggtacacccgcttccagcaaaatggcgatcccttgcgcggcaatcagcggcgtttgttctgccggttttgccagcacgctgttacctgccgccagtgcggcggcgatctgcccggtgaaaatagccagcgggaagttccacggactgatacacaccacaggccctaatggacggtgggtttcgttagcgaaatcatcccgcacctgtccggcgtagtagtggagaaaatcgaccgcttcgcgcacttcggcaatggcgttactgaaggtttttccggcctcacgcaccagaataccaatcagttgctgcatctggctttccatcagcacggcagcgcggtgcaaaatcgctgcgcgttcagccggaggcgtggcaaaccagattggcgcgttattaaccgcactttccagcgcctgttctacttcacgcggcgtggcttcacgcacatagcccacaatatctttcggttccgcagggttaataacggggctcatctcacctgccgctaccggttgttccagcattggcaaggcctgccatttttgcagtgcactattgagcagggcagaggagaggctggccaggcggtgttcgttagcgagatccagccctgcgctgttgtcgcgcccgtgaccgtaaagatcgcgcggcaggggaattttcggatgcggtaatccagtttgcccttcctgttgcgccagtttttctacagcagtgaccggatcggcgaccagttcatccagtggcaaagaggtgtcggcaatacggttaacaaagctggtgttagcaccgttttccagcaggcgacgcaccagatacgccaacagcgtttcatgtgtgccaaccggagcataaatacgacacggacggttaagtttgccgtcggcaactttcccggggacctgctcatacagtggctcgcccataccatgcaggcactggaactcgtactgacccgggtagtagttctgccccgccagttgataaatcgccgccagcgtatgggcgttgtgcgtcgcgaactgcgggtagattagattcggcaccgccagcagctttttcgcacaggcgagataagaaacgtcggtatacaccttgcgggtataaaccggataaccttcaaggccgtccatctgcgcacgcttaatttcactatcccagtacgcgcctttcaccaggcgaatcatcagacggcgacggctgcgggtggcgagatcaatcaggtaatcgatcaccaacgggcagcgtttttgataagcctgaataacaaaaccgatgccgttccagcctgccagttccggctcgaaacagagtttttccagcagatcgagggagatctccaggcgatcggactcttcggcgtcaatgttgataccaatatcgtactgacgcgccagcagggtgagacttttcagacgcgggtaaagctcttccattacccggtcatactgggcgcggctataacgcggatgcagcgcgctcagtttgatactaatgcccggcccttcatagatgccacgaccgttagacgctttaccgatggcgtgaatcgcctgctgataggaaaccatatacgcctgtgcatctgcggcggtcagcgcggcttcgcccagcatatcgtaagagtaacggaaacctttctcttccagcttgcgggcattggctaacgcttccgcgatggtttcgccagtgacgaactgctcacccatcaggcgcatcgccatatccacacctttgcggatcagcggttcaccgcttttaccgataatgcggttcaggctgcgggagaggctggcttcgttatgggtggaaaccagtttgccagtaaacagcagcccccaggtggcggcattaacaaacagactcgggctacgaccaatgtgactctgccagttaccgttgctgattttgtcgcgaattaacgcgtcgcgggtggctttgtcgggaatacgcaacaacgcttccgccagacacatcagcgccacgccttcctggctactcaggctaaactcctgcaataacccctggaccatacctgcgcgaccactggcatttttttgattacgcagtttatcggccagctgatacgccagtttgtgcgcctgttcagcaactggctgcggcaggcgggcttgttccagcagcatagaaaccgcttcggtttccgggcggcgataggccgcggtgatcgcggcgcgggaaacgctctggggcaatatttgctcggcaaagtcgaggaatggctggtgtggttcctctgccggagtcggtgcttcatcgctctcattggccgcgccagaaagcagcgcaggtagctccggcagagtatcgctgttttccagttgttcgagataagaaaaaatcgcctgcttaattaaccagtgtggtgtgcgatcgatacgtgtcgcggcagacttaatacgctcacgcgtcgcgtcgtccagcttaacccccatggtggtggttcccatgccattactcctgttgttcagaaaggtgcaacttaacgttatcgtgaaatatccatgatgttgcaactttgtgcaaccatgttaaatgtgacatgcgtagcaagcttaaaaatgaatgaaatgttaataaaagaaatcgatatgacagggattaaaaaaataactcagactttttctctgcggcagttaacatttttgaaaggtgcaaccgcaaaaaatgtgagagagtgcaacctgatgaaaaatagtgtcgctgagcactaaaatttaatgtaaatggtgtgttaaatcgattgtgaataaccagcgcttccggcaggatacggtcgccctggtaaaacataaactctgttaccccgttccggtggcagatataacggcaagtttcgacattgccgataataattttttggagactttagatggctattagcacaccgatgttggtgacattttgtgtctatatctttggcatgatattgattgggtttatcgcctggcgaagtacgaaaaactttgacgactatattctgggcggtcgtagtcttgggccattcgtgacggcattaagcgcgggtgcgagcgatatgagcggctggctgttaatggggttgccgggcgctgtttttctttccgggatttccgaaagctggatcgccattggcctgacattaggcgcgtggattaactggaagctggtggccgggcggttgcgtgtgcataccgaatacaacaataacgccttaacactgccggattatttcaccgggcgctttgaagataaaagccgcattttgcgcattatctctgcgctggttattttgctgttcttcaccatttattgcgctagcggcattgtggcaggcgcgcgtctgtttgaaagtacctttggcatgagctacgaaacggctctgtgggcgggcgctgcggcgacgatcctttacacctttattggcggtttcctcgcggtgagctggactgacactgtacaggccagcctgatgatttttgccctgatcctgacgccggttatcgtcattatcagtgtcggtggctttggtgacagcctggaagtgatcaaacaaaagagcatcgaaaacgttgatatgctcaaaggtctgaactttgttgccattatcagtctgatgggttgggggctgggttacttcgggcagccgcacattctggcgcgttttatggcggcggattctcaccacagcattgtccatgcgcgtcgtattagtatgacctggatgatcctctgcctggcaggggcggtggctgtcggcttctttgggattgcttactttaacgatcatccggcgttggctggtgcggtaaatcagaacgccgagcgtgtgtttatcgaactggcgcaaattctgtttaacccgtggattgccgggattctgctgagcgcaattctggcggcggtaatgagtaccttaagttgccagctgctggtgtgctccagtgcgattaccgaagatttgtacaaagcgtttctgcgtaaacatgccagccagaaagagctggtgtgggtagggcgtgtgatggtgctggtggtggcgctggtggcgattgcgctggcggcaaacccggaaaaccgcgtgctgggcttagtgagctacgcgtgggcaggctttggcgcggcgtttggtccagtggtgctgttcagcgtgatgtggagtcgcatgacgcgtaacggtgcgctggcggggatgatcatcggtgcgctgacggttatcgtctggaaacagttcggctggctgggactgtacgaaattattccgggctttatcttcggcagtattgggattgtagtgtttagtttgctgggtaaagcgccgagtgcggcgatgcaaaaacgctttgccgaggccgatgcgcactatcatagcgctccgccgagtcggttgcaggaaagctaagggacttagcctgcggcggttttgtttggcttcagcagcgggttgcgctcccttaatgtgcctcgccatataaattgaatggtgcagggagcgcgcagggggcggccaatcgccgccgccccctgctgtcccggccttcggggaacgcttcagcgattttgacgccaccaacacccgagctgttattatgttccgggcaaaaagttagatttgataatcgcggatggacgaaattgcttgatacacccgcttatcagttttacatggaagctctgatgcattgagtctggacagttttgtcggctggatacggcgtttacgcggcatccggcaagaacacatggttctttgcaaacaatcccatctttctaccctggaataatcgtttatatcccttggcattacctctctttgtttacattccaacatcattttataaacattccgcttgtgtttttctttgccgtaatgataatcgctatcactgcgatttacttttctttgcatagattgactcagaaaaacgtttaagggtgggtggcatgtttgttccgtttctcattatgttgcgcgaaggacttgaagccgcgctgattgtcagtttgattgccagctatcttaagcgtacccagcgaggccgatggattgtgtgatgtggattggcgtgttgcttgccgctgcgttgtgcctgggcttgggtatcttcattaacgaaaccaccggcgaatttccgcaaaaagaacaggaactgtttgaaggtatcgtggcggtgatcgccgtggtgatccttacctggatggttttctggatgcgcaaagtgtcgcgcaacgtcaaagtgcaactggaacaggcagtcgatagcgcattgcagcgtggaaatcatcatggctgggcgctggtgatgatggtcttttttgccgttgcaagggaagggctggagtcggtctttttcctgctggcggcatttcaacaagatgtcgggatctggccgccgctgggtgcaatgctcggtcttgctactgccgtggtgctaggcttcctgctctactggggcggtattcgcctcaatcttggtgcattttttaaatggaccagcctgtttattctcttcgtcgccgcagggctggcagctggtgccattcgcgcatttcatgaagccggattgtggaaccactttcaggaaatcgccttcgatatgagtgcggtgctctcaactcactcgctgtttggcacgctgatggaagggatttttggctatcaggaagcgccgagcgtcagcgaagtcgccgtctggtttatttatctcatcccggcgctggtggcatttgctctgccaccacgcgcaggggcgacagcgtctcgctccgcgtaacaaatacgacgcaaactcttgcttagttacaacatactttaaagggatagtctcgtcatgaccattaacttccgccgtaacgcattgcagttgagcgtggctgcgctgttttcttctgcttttatggctaacgccgctgatgtgccgcaggtcaaagtgaccgtgacggataagcagtgcgaaccgatgaccattacggttaacgccgggaaaacacagttcattattcagaaccacagccagaaggcgctggagtgggagatcctcaaaggcgtgatggtggtggaagagcgggaaaatatcgcccctggctttagccagaaaatgacggcgaatttacagcctggcgaatacgatatgacctgcggtctgctgactaacccgaaagggaagttgatcgtcaaaggtgaggcaacggcggatgcggcgcaaagtgatgcgctgttaagtcttggtggtgcaattactgcatataaagcgtatgtcatggcggaaaccacgcagctggtgaccgacaccaaagcctttaccgacgcgattaaagcaggcgatatcgaaaaagcgaaagcactgtatgcaccgacgcgccagcactatgagcgtattgaaccgattgctgaactgttctccgatctggatggcagcattgacgcccgtgaagatgattacgagcaaaaagccgccgacccaaaattcactggtttccaccgtctggaaaaagcattgtttggcgacaacaccaccaaagggatggatcagtacgctgagcagctttataccgatgtggtcgatttgcaaaaacgcatcagtgaactggctttcccacctagtaaagtggtcggcggcgcagccggactgattgaggaagtggcagccagcaaaattagcggtgaagaagatcgctacagccacaccgatctgtgggatttccaggctaacgttgaaggcagccagaaaattgtcgatttgctgcgtccacaactgcaaaaagccaacccggaactgctggcaaaagtcgatgccaactttaaaaaggtcgataccattctggcgaaataccgtactaaagacggttttgaaacctacgacaaattgaccgatgccgaccggaatgcactgaaaggaccgattactgcgctggcggaagatctggcgcaacttcgcggtgtgctgggactggattaagcgttatgcagtataaagatgaaaacggcgtgaatgaaccgagtcgccgacgtttactgaaagtgataggtgcactggcgctggcgggaagttgtccggtcgctcatgcacaaaaaacgcaaagtgcgccgggtacgcttagtccggatgctcgcaatgagaaacagccgttttatggtgagcatcaggcagggatcctgacgccacaacaggccgcaatgatgctggtggcgtttgatgtgcttgccagcgataaagccgatcttgagcggttgtttcgcttgttgactcagcgttttgcttttctgactcagggcggagcagcaccagaaacgccaaatccgcgcctgccaccactcgattccggcattcttggcggctacattgcgcccgataatctcaccatcacgttaagcgtgggtcacagtttgtttgatgagcgctttggccttgcgccacagatgccaaaaaagctgcagaagatgacgcgtttccccaacgacagcctggatgcggcgttatgtcatggtgatgtgttgctacagatttgcgccaacacccaggacacggttatccatgcgctgcgcgatatcatcaaacacacgccggatttgctcagtgtgcgctggaagcgggaagggtttatttccgatcacgcggcgcgtagtaaaggcaaagagacgccgattaatttgctgggtttcaaagacggcactgccaatcccgatagccagaatgataagttgatgcaaaaagtggtgtgggtaacggcagatcagcaggagcctgcgtggacaatcggtggcagctatcaggcagtacgcttgattcagtttcgagtggaattttgggacagaacgccgctgaaagaacagcagacgatttttggccgtgataagcaaaccggtgcgccgctgggaatgcagcatgagcatgatgtgcctgattacgccagcgacccggaagggaaggtgatcgcgctggacagccatatccggctggcgaatccccgcacggcggagagtgagtccagcctgatgctgcgtcgtggctacagttatagtctgggcgtcaccaactccgggcaactggatatggggttgctgtttgtctgctaccaacacgatctggaaaaaggcttcctgacagtacaaaaaaggctcaatggcgaagcgctggaggaatacgttaaacctatcggcggcggttatttttttgcgctgccgggggtgaaggacgcgaacgattatttcggaagcgcgttattgcgggtttaatgtttttaggcggataaggcatttgtgcgcagatgcctgatgcgacgcttgcgcgtcttatcatgcctacaatcagtgcgggtttggtaggctggataaggcgttcacgccgcatccggcgatcgtgcactgatgcctgatgcaaatcctgctgaaagcacacagcttttttcatcactgtcatcactctgtcatctttccagtagaaactaatgtcactgaaatggtgttttatagttaaatataagtaaatatattgttgcaataaatgcgagatctgttgtacttattaagtagcagcggaagttcccggcagtgatagtcagtcactatggagatcgcggatggtaacgtcctgtactggacatgttttagataatcaacgcgccaccactcgcggagttttctcctccggtagtcatctcgtcactttgcattttcaacctcatcctttctttagttgtgttaccgacgccgtaaacggtgcgcgtagccgttttagcgcattttatccaaaagcaaactatggcttacaaggaagccaaccctctgatgttcgtgcgcataatcgcgctgccaacggcgcgtgtgatgaatacaaacaactcaaggtgctctccatgggaagacaaaaagcagtgatcaaagctcgtcgcgaggcaaaacgtgtgctgagacgggatagccgcagccataagcagcgtgaagaagaaagcgtcaccagccttgtgcagatgggcggcgtagaagccattggtatggcccgcgacagtcgcgatactagccccatcctcgcgcgaaatgaagcgcaattgcactatctgaaggctattgagagtaagcagctgatattcgccacgggcgaagccgggtgcggaaaaacctggatcagcgcagcaaaagcggcagaggccctgatacataaggatgtcgacaggattatcgtcacccgtccagttctgcaagccgatgaagatcttggcttcttacctggagatatcgcagaaaagtttgctccctattttcgcccggtctacgacgtgctggtccggcgcttaggggcttcctttatgcagtactgcctgcgaccggaaatagggaaggtggaaattgcgccgttcgcctatatgcgtggacgtacctttgaaaatgcagtcgtcattcttgacgaggcgcagaatgtgactgccgcgcaaatgaaaatgtttttaacccgcctcggggagaacgtgacggttatcgtcaacggtgatatcacgcaatgcgatttgcctcgcggcgtgtgctccggattaagtgacgcgctggaacgtttcgaagaagatgaaatggttgggatcgtccggttcggtaaagaggactgcgtacgtagcgcactttgccaacgtacgctgcatgcctacagttaagtgtgttatcggtgcagagcccgggcgaaccgggctttgttttgggtgttcccggtgtgtgcaatatacgaaaaaaaagcccgtactttcgtacgagctcttctttaaatatggcggtgagggggggattgactcgcttcgctcgccctgcgggcagcccgctcactgcgttcacggtctgtccaactggctgtcgccagttgtcgaaccccggtcggggcttctcatccccccggtgtgtgcaatatacgaaaaaaaagcccgtactttcgtacgagctcttctttaaatatggcggtgagggggggattcgaacccccgatacgttgccgtatacacactttccaggcgtgctccttcagccactcggacacctcaccaaattgtcgttcctgtcttgctggaacgggcgctaatttagggaaatcatgacctgaggtcaacaaactttttgaaaaaatcgcgcgtttattcaaacttcaatcaatgtgtggttttaataagcgaaatctgctttttttgccaccgaccacggatttgttatgctggtggcctttgtagatcataacgataagtgcgaataaatttcgcacaacgcttttcgggagtcagtatggatatcatcttttatcacccaacgttcgatacccaatggtggattgaggcactgcgcaaagctattcctcaggcaagagtcagagcatggaaaagcggagataatgactctgctgattatgctttagtctggcatcctcctgttgaaatgctggcagggcgcgatcttaaagcggtgttcgcactcggggccggtgttgattctattttgagcaagctacaggcacaccctgaaatgctgaacccttctgttccactttttcgcctggaagataccggtatgggcgagcaaatgcaggaatatgctgtcagtcaggtgctgcattggtttcgacgttttgacgattatcgcatccagcaaaatagtagccattggcaaccgctgcctgaatatcatcgggaagattttaccatcggcattttgggcgcaggcgtactgggcagtaaagttgctcagagtctgcaaacctggcgctttccgctgcgttgctggagtcgaacccgtaaaagctggcctggcgtgcaaagctttgccggacgggaagaactgtctgcatttctgagccaatgtcgggtattgattaatttgttaccgaatacccctgaaaccgtcggcattattaatcaacaattactcgaaaaattaccggatggcgcgtatctcctcaacctggcgcgtggtgttcatgttgtggaagatgacctgctcgcggcgctggatagcggcaaagttaaaggcgcaatgttggatgtttttaatcgtgaacccttaccgcctgaaagtccgctctggcaacatccacgcgtgacgataacaccacatgtcgccgcgattacccgtcccgctgaagctgtggagtacatttctcgcaccattgcccagctcgaaaaaggggagagggtctgcgggcaagtcgaccgcgcacgcggctactaataaagcatcaggattcctgctatccttggcgggaattgaatacaggagagagttatgtatcccgtcgaccttcatatgcataccgttgccagcacacatgcatatagcacattaagtgattacattgcccaggccaaacaaaagggcattaaactttttgcgatcaccgatcatggcccggatatggaagatgcgccgcatcactggcacttcattaacatgcgtatctggccgcgagtggttgatggggtagggatcctgcgcggcatcgaagctaacattaaaaatgttgatggtgaaattgactgcagcggtaaaatgtttgacagcctggatctaattattgccggttttcatgagccggtttttgcgccacatgataaagcgaccaatacacaagcgatgatcgccactatcgccagcggcaatgtgcatataataagccatcccggaaatcccaaatatgaaatagatgtgaaagccgttgctgaagcagccgcgaaacatcaggtggcgctggaaatcaataattccagttttttacacagtcgtaagggcagtgaagacaactgtcgtgaggtagccgcagcggtacgtgatgctggaggttgggtggcattaggcagcgattctcacaccgcgtttaccatgggggaatttgaagagtgtcttaaaatcctcgacgcggtagattttccgccagagcgcattttgaatgtttctccgcgccgcttactgaacttccttgaatctcgcggtatggcaccgattgcggaatttgcagacctttaattactagtaatggaaatatattaatgaacgagttttctatcctctgtcgtgtgctgggtagcctctattaccgccaaccacaagatcctttactggtgccgctgtttaccctgattcgtgaggggaaactggctgcgaactggccactggagcaggatgagttgctgacacgtttgcagaaaagctgtgatatgacgcaagtctctgccgattacaatgcgttgtttatcggcgatgaatgtgctgtgccgccatatcgtagcgcatgggttgagggcgcgacggaagcggaagtgcgcgcttttctttctgagcgagggatgccattagcggatacgccagccgatcacatcggcacattgctgctcgcagcttcctggctggaagatcagagtacggaagatgagagcgaagcactggaaacactgttcagtgagtatctgttaccctggtgtggtgcgttccttggcaaagtggaggcccatgcaaccacgcctttctggcgcaccatggcaccgctaacccgcgatgccattagtgcaatgtgggacgagctggaagaagattctgaagaataagtgtgatctacgtcactcataactgcaacggataatttgttgttgcataaaatgtgtgctcgatctcattcatggccgcgttttctgctatcatgcgcggcatgaacatacttctctctattgcaatcacaacaggcattctctccggtatctggggatgggtggctgtttccctgggcttactaagctgggcgggcttcctgggctgtacggcctactttgcctgcccgcaaggtgggctgaaagggctggcgatctccgctgcaaccctgcttagtggcgtggtgtgggcgatggtcattatttacggtagtgcactggcaccacatctggaaattctcggttatgtcataaccggtattgtcgcgtttctgatgtgtattcaggccaaacagctgctgcttagttttgttccggggacgtttataggcgcatgcgcgacgtttgccgggcagggtgactggaaactggtgttacctagcctggcgcttgggctgatatttggttacgcaatgaaaaacagtggcctgtggctggcggcgcgtagtgcaaagacggcgcaccgtgagcaggaaatcaaaaataaagcgtgaggggcactcacgctttcgcttaaacagtaaaatgccggatgataattccggcttttttatctgtcaggattccggtggaacgctcatatggcggtatttcaccagaatgtcattctgccgttctgctttattttgcaaatcccacagaccacggtcgataccatcattaatcaggaaaatgacccctgtttcgatagcgctcatcaggcacagcataacaggttcgttgctggtgtaacccacttccccttcaagcaagcgctggtagtcaataaagcggaaaaccccggcctgaacttcataggaaagtatcgtcttactggtgttcacgctagaaaggatctcgccggtactcacattgacgacgcgcaggttcacggcaatctgatcgagctggtattgcgtgtcggcaccgatgccaaaatatcttgccccaaccccgccagatttgacgttgctttcataaccgataatgctaccttcaaccatgatatttgccgccgttaaagattgcagcgggattcggttattaatggcaaccgtgccgttttcttgtgccgcacgaataatcttgcgctcgttaagcaggttttgtaagccctggcgctccagcggtataaaccagcgagaatctttcagtgccgtgaccagcattgccgtggcgctttgcggaacagcagtggagaagttacttgccgggtagggtttaaattgcccggtttcgtcctgaatgttgtatacgctaacaaagattttacccgtcggcgctggcagatgggtcaaatctttgtagctctgagcacgaggcattaatgtcggtctggcggcttctttaggcggggcggttaagcatccgctcagtaacatgacggcaaccaaaagaaataagcgctgcatgattattttccttatgaagctggggcttaaaaatcggtactgttattttgtaaaccgctaacctggatggtgctggtttgtccggttttacgatctgtcacgttcaactgcaattgaccatcgcggttggcaatatcgacaatataatcgttggtcaccatgcggcccggtttaccggtattaatattgctcagtagcccacctaaaatttgactctggatggcctgagtaaagttatctaacgcactgggtgtttcaataccaaagtcatcgttatagctcggatctttataagagttttgggcctgagcgctatttaataaaaaagcgccattatttgggttaccaccaaagtttggattacggaactggaaagtcatggttccagcccaacttaatgggctaataagcatgagtagaactactgcatgtttgacacgcattgcagcctccgaacaattttttatttagaattcatcatgcgccaaatcgcccgtacttaataacgcctgatttatctggcgacgatttagtgcttcttcagtttgaatcagtgcaaagacgacagttttctcgaagtctcttttcaacggaaataaaaaagtctggaaaataacgtcctgattgaccgttatagtgatccagcttccccatcgtgcactgggcctttcattaatcgttaagttacccgtatagtcactttcccatttatcactaaaggctcggtaaaaatcatggccaatagaactaacagtatggtcagttagcaatcccgggacttctacctcaacggcgtgaagattccctgcggcgaacagaaattctgccgccacaatccagcgtaaataacgtttcatggctttatcgcctgaggttatcgtttgcccaggaaaccgcttgtgtccggttttttacggctatcttcttgaaaagattataaagatgcgttttaaccgtattttcgctgatgaacaagctacgagcgatctcgttattagacgcgccgatacgcagcttattcaggatctctttttcccgatgagtaaggagggcactttccgtgctgttataacgatagttaccactatgcgtaatcaggtagctggcaagcttttgcgtaaagtagcattcgccgcgcaggacgccttgcaacccattgacaacacgttcttgatcctccatggaataaaaaacgccgttgatatgaggccagttttcaatgtcgcggtacgggtaatcttcaggcgtatttagcaacaatattttgatattgttgtttttcctgctcaaagtatcctgccaataatggataagctttttatccgcttccatcatatccagaagaataatagagccactagagatatcgtccagagaacgttgaatattatgtaattttcctgtaattgccaggctttgtttaaggtgctgcaagagagctgtcgcctgcaaagaagatttagtgatcaacaataatgtatgaccatgaatactatggacttcattaaacatgatgaaaccccgctttttttattgatcgcacacctgacagctgcctctaaaatagaagcaccagaagtactgacagatgttgcactgctgtgtgtagtaataaatcagccctaaatgggtaaaatataaaactaatggattacatctgatttcaatctagccattacaaatcttaaatcaagtgttaaacatgtaactaaatgtaactcgttatattaaaatgttaaccttaaggttttattaagtttagaaatgatagaaaagttgtacatttggtttttattgcacaattttaaaaaatcatacaaatggtgataacttactaataatgcatataaaaaatatttcggtgtagtcctttcgtcatgtaaaacgttcttgttttttctccacacctccgtggacaattttttactgcaaaaagacgaggtttgtcacggcttgtgcgcaagacatatcgcagcaatcagcgacgggcaagaagaatgactgtctggtgctttttgatagcggaaaacggagatttaaaagaaaacaaaatatttttttgcgtagataacagcgtatttacgtgggttttaatactttggtatgaactaaaaaagaaaaatacaacgcgcgggtgagttattaaaaatatttccgcagacatactttccatcgtaacgcagcgttaacaaaatacaggttgcgttaacaaccaagttgaaatgatttaatttcttaaatgtacgaccaggtccagggtgacaacatgaaaaacaaattgttatttatgatgttaacaatactgggtgcgcctgggattgcagccgcagcaggttatgatttagctaatagtgaatataacttcgcggtaaatgaattgagtaagtctagttttaatcaggcagccataattggtcaagctgggactaataatagtgctcagttacggcagggaggcagtaaacttttggcggttgttgcgcaagaaggtagtagcaaccgggcaaagattgaccagacaggagattataaccttgcatatattgatcaggcgggcagtgccaacgatgccagtattagccaaggtgcttatggtaatactgcgatgattatccagaaaggttctggtaataaagcaaatattacacagtatggtactcaaaaaacggcaattgtagtgcagagacagagccaaatggctattcgcgtgacacaacgttaatttccattcgacttttaaatcaatccgatgggggttttacatgaaacttttaaaagtagcagcaattgcagcaatcgtattctccggtagcgctctggcaggtgttgttcctcagtacggcggcggcggtaaccacggtggtggcggtaataatagcggcccaaattctgagctgaacatttaccagtacggtggcggtaactctgcacttgctctgcaaactgatgcccgtaactctgacttgactattacccagcatggcggcggtaatggtgcagatgttggtcagggcagtgatgacagcagtatcgatctgacccaacgtggcttcggtaacagcgctactcttgatcagtggaacggcaaaaattctgaaatgacggttaaacagttcggtggtggcaacggtgctgcagttgaccagactgcatctaactcctccgtcaacgtgactcaggttggctttggtaacaacgcgaccgctcatcagtactaatacatcatttgtattacagaaacagggcgcaagccctgttttttttcgggagaagaatatgaatacgttattactccttgcggcactttccagtcagataacctttaatacgacccagcaaggggatgtgtataccattattcctgaagtcactcttactcaatcttgtctgtgcagagtacaaatattgtccctgcgcgaaggcagtagtgggcaaagtcagacgaagcaagaaaagacccttagtttgcctgctaatcaacccattgctttgacgaagttgagtttaaatatttccccggacgatcgggtgaaaatagttgttactgtttctgatggacagagtcttcatttaagtcaacaatggccgccctctagtgaaaagtcttaatttgttgaaatatcgagcataagatgaatctggagagaatggtctgctgcgaatcagccaacctgaaagtatggataacacaaccctcaaggatgactaatcattgaggaaatagaataaatgttcagaccttttttaaactctcttatgctcggcagtttgttttttccttttattgccattgctggaagcaccgtgcaagggggcgtgatccatttttatggccaaattgtggaaccggcatgtgacgtcagcacccagagtagtcccgtagaaatgaactgcccacagaatggttctattccgggcaaaacctactccagcaaagcgttaatgagcggcaatgtcaaaaacgcgcaaatagccagtgtaaaagtgcagtatcttgataaacagaaaaagctggctgtaatgaacatcgaatataactaagtttctgaacaactcacgttgctgagcagaaaaatgcgatttaaccaaaaagcctgctgtacacttaagaaacaagaaggtgtaaggaggcgttatgaaaacgcgtattcatgttgtgcagggtgatattaccaaactggccgttgatgtgattgtgaatgcggctaatccgagtttaatgggaggcggcggcgtcgatggggccattcatcgcgcagcgggtccggccctgctggatgcttgtttaaaagtcaggcaacagcagggcgattgccctacggggcatgccgttattacgcttgcaggcgatcttcccgctaaagccgtagtgcacaccgtcgggccagtctggcgtggtggtgaacaaaacgaagaccagcttttgcaggatgcctatctcaatagcctacgactggtggcggcaaacagctatacgagtgtggcttttcctgcaatcagtactggggtttatggttaccctcgtgcggcagcggctgaaatcgcagtaaaaaccgttagtgaatttattacccgtcacgctttacccgaacaggtatactttgtctgttatgatgaagaaaacgcccacctctacgaaagactccttacccaacaaggagatgaatgatttgccccggctggcgagcgcggtgctgccactgtgtagccaacatcccggtcagtgtggcctttttcctctggagaaaagtctggatgcgtttgccgcccggtatcgtctggccgaaatggcagagcatacgctcgatgttcagtattacatctggcaggacgatatgagcggtcggttactgttttccgccctgttagccgcagcaaagcgtggcgttcgcgtccgtttgttgctggacgacaacaatacgcccggacttgacgacattttacgcttgcttgacagtcatccacgcattgaagtccggctttttaatcctttcagctttcgcttgctgcgtccgcttggttatatcaccgacttttcccgtcttaatcgccgtatgcacaataaaagtttcactgtcgatggcgtggtgaccctggtgggaggacgaaatattggtgatgcctattttggagcaggggaggagccactttttagcgatttagatgtcatggcaataggacccgtggtagaggacgttgccgatgatttcgcccgctactggtattgcaaaagcgttagtcccttacagcaggtgctggatgtcccggagggtgaaatggcggatcgcatcgagttacccgcctcctggcataacgatgccatgacgcatcgttatttacgcaaaatggaatccagtccatttataaatcatctggttgatggaacattgccgcttatctgggcgaagacacgtttattaagtgatgatccggcgaaaggggagggcaaggcaaaacggcatagtctgttaccgcagcgcctgttcgatatcatgggcagtcccagtgaacgcatcgatattatctcttcctattttgtaccgacacgcgcaggtgtggcgcaactcttacggatggtgagaaaaggggtaaagattgcgatcctaaccaattctcttgccgctaacgatgttgctgtcgtccatgccggatacgcgcgctggcgcaaaaaattgctccgctatggcgtggaattatatgaactcaagccgacgcgtgaacaaagtagtacgttacacgatcgcggcataaccggtaattccggagccagcctgcatgctaaaacctttagcatcgatggtaaaacggtgtttatcggctctttcaatttcgatccgcgtagtacattgctcaatactgaaatgggcttcgtgatagagagcgaaacgctggcacagttaattgataaacgctttattcagagccagtatgatgcggcctggcagctccgtctggacaggtggggacggatcaactgggttgatcgtcatgcaaagaaagagattattctcaaaaaagaacccgccaccagtttctggaagcgggttatggtcagactggcgagcatattgcccgtggaatggttattgtaaatgtggcttaacgggctggtgctttatcgttctcacgcttaacaaccggtttaccagagaacaaaaacttcagtaacgggatgcgcaaatgaatttcatacagaattatcgcaatccctactacaaatatcaggccacagagaaaaccaagccagttggaggtgatgtgcggtgtaatgtatgcgccgaaaaacagcgttaacgggtggtgaaccagatagataaacaggcttgcgttaacaaaataagtcacccgcgcactctggaagttaagcaaacggtggccaaaggagaagaccacattcaccatccacagaccgaggaccatggtgatcacgctctcggtttcgtacatccaggcatcgccactgccatagcgctggttgagtaaataagcgacaaacgccaatgctgctgcaagggtacagccacgagacggcgtggtaaacaaggctttaagatgagggaaaatgaaagccagtgcgccgaggataaagaacggcaaataaaacagcgtttgcatgacaataaaattgaacatgccattactcagaatgggcggatacacaataaaaatcgttcttcttattaccgcataaccgatgccgaggcataaaaaaatcacgcttagttttaccatgctgaattttttattcgttttatcagaattttctaaattatttctgatgcgcttaaatatccatacgcacagcgtcgtcatgaccactaacaccagtaaaaaccacaggtgacttattaattcccaggccaacgtattatatttgtcatacaaactcagcccaggccaactttccgcttttcctttgacatattgcagcataataaattgcggtaatgtcagtagggggatggctgttaacatcgggatacctacacgttcgacacgtactttccaccattttttcaagggatagcgtaaaaaaagcatgtaggaaaagtagccggatataacgaaaaatacctgcatgcggaagctgtggatgaagtcattaaaaagggtcagccacaaactactttcggcgctattcacatgccatgtatggctgctatagattaaagaaatatgaaaaggtatccctaacaacatcagccaggcgcggatggagtcgaggaaatattcacgttgcgcgggtactgggttcatatatggttaactaatctcggatttttcgtcttatccctgtcgggttatgcctttaggcttgttgccatagtgacaccgacctgaccgcgccaggcgcaggcttcaaggtttttatgcatagcatcatcgctaccactaaccagaatggaagcgtctgtaagacggttgataaataaatttgctggcaaaccctacacgaagtcgatgcttctgtctttaggagaagcacggaaagtgaaaacggttgcaatcaggtgcttaatccatgagccagcgtgctgaacgataccgggattctgttgtcggaatggctggttatccattaaaatagatcggatcgatataagcacacaaagggggaagtgcttactaattatgaaacataaactacaaatgatgaaaatgcgttggttgagtgctgcagtaatgttaaccctgtatacatctagtagctgggctttcagtattgatgatgtcgcaaagcaagctcaatctttagccgggaaaggctacgagacgcccaaaagcaacttgccctccgttttccgcgatatgaaatacgcggactatcagcagatccagtttaatcatgacaaagcgtactggaacaatctgaagaccccattcaaactcgagttctaccatcagggtatgtacttcgataccccggtcaaaataaatgaagtgactgccaccgcagtcaaacgaatcaaatacagcccggattatttcactttcggcgatgttcagcatgacaaagatacggtaaaagaccttggctttgccggttttaaagtgctttacccgatcaacagcaaagataaaaacgatgaaatcgtcagcatgctcggggccagctatttccgcgtgattggtgcaggtcaggtttatggcctttctgcccgcggcctggcaattgataccgccttgccaagcggtgaagaatttccgcgcttcaaagagttctggatcgagcgtccaaaaccgactgataaacgtttaaccatctatgcattgcttgacagcccgcgtgcgacaggtgcttacaaattcgtggttatgccagggcgtgacacggttgtggatgtgcagagcaaaatctatctgcgcgataaagtcggcaaactgggggttgcaccgttaaccagtatgttcctgtttgggccgaaccaaccgagccctgcaaataactatcgtccggagttgcacgactctaacggtctctctatccatgccggtaatggcgaatggatctggcgtccgttgaataacccgaaacatttagcggtcagcagcttctccatggaaaacccgcaaggctttggtctgttgcagcgcggtcgtgatttctcccgctttgaagatctcgatgatcgttacgatctccgtccaagcgcatgggtgactccgaaaggggagtggggtaaaggcagcgttgagctggtggaaattccaaccaacgatgaaaccaacgataacatcgtcgcttactggacgccggatcagctgccggagccgggtaaagagatgaactttaaatacaccatcaccttcagccgtgatgaagacaaactgcatgcgccagataacgcatgggtgcaacaaacgcgtcgtagtacgggggatgtgaagcagagcaacctgattcgccagcctgacggtactatcgcctttgtggtcgattttaccggcgcagagatgaaaaaactgccagaggataccccggtcacagcgcaaaccagcattggtgataatggtgagatagttgaaagcacggtgcgctataacccggttaccaaaggctggcgtctggtgatgcgtgtgaaagtgaaagatgccaagaaaaccactgaaatgcgtgctgcgctggtgaatgccgatcagacgttgagtgaaacctggagctaccagttacctgccaatgaataagacaactgagtacattgccgaagactgatatccgcgccgttcatcaggcgctggatgccgaacaccgcacctgggcgcgggaggatgattccccgcaaggctcggtaaaggcgcgtctggaacaagcctggccagattcacttgctgatggacagttaattaaagacgacgaagggcgcgatcagctgaaggcgatgccagaagcaaaacgctcctcgatgtttcccgacccgtggcgtaccaacccggtaggccgtttctgggatcgcctgcgtggacgcgatgtcacgccgcgctatctggctcgtttgaccaaagaagagcaggagagcgagcaaaagtggcgtaccgtcggtaccatccgccgttacattctgttgatcctgacgctcgcgcaaactgtcgtcgcgacctggtatatgaagaccattcttccttatcagggttgggcgctgattaatcctatggatatggttggtcaggatttgtgggtttcctttatgcagcttctgccttatatgctgcaaaccggtatcctgatcctctttgcggtactgttctgttgggtgtccgccggattctggacggcgttaatgggcttcctgcaactgcttattggtcgcgataaatacagtatatctgcgtcaacagttggcgatgaaccattaaacccggagcatcgcacggcgttgatcatgcctatctgtaacgaagacgtgaaccgtgtttttgctggcctgcgtgcaacgtgggaatcagtaaaagccaccgggaatgccaaacactttgatgtctacattcttagtgacagttataacccggatatctgcgtcgcagagcaaaaagcctggatggagcttatcgctgaagtcggtggcgaaggtcagattttctatcgccgccgccgtcgccgcgtgaagcgtaaaagcggtaatatcgatgacttctgccgtcgctggggcagccagtacagctacatggtggtgctggatgctgactcggtaatgaccggtgattgtttgtgcgggctggtgcgcctgatggaagccaacccgaacgccgggatcattcagtcgtcgccgaaagcgtccggtatggatacgctgtatgcgcgctgtcagcagttcgcgacccgcgtgtatgggccactgtttacagccggtttgcacttctggcaacttggcgagtcgcactactggggacataacgcgattatccgcgtgaaaccgtttatcgagcactgcgcactggctccgctgccgggcgaaggttcctttgccggttcaatcctgtcacatgacttcgtggaagcggcgttgatgcgccgtgcaggttggggggtctggattgcttacgatctcccgggttcttatgaagaattgccgcctaacttgcttgatgagctaaaacgtgaccgccgatggtgccacggtaacctgatgaacttccgtctgttcctggtgaagggtatgcacccggttcaccgtgcggtgttcctgacgggcgtgatgtcttatctctccgctccgctgtggtttatgttcctcgcgctctctactgcattgcaggtagtgcatgcgttgaccgaaccgcaatacttcctgcaaccacggcagttgttcccagtgtggccgcagtggcgtcctgagctggcgattgcactttttgcttcgaccatggtgctgttgttcctgccgaagttattgagcattttgcttatctggtgcaaaggaacgaaagaatacggcggcttctggcgcgttacattatcgttgctgctggaagtgcttttttccgtgctgctggctccggtacgcatgctgttccatacggtcttcgttgtcagcgcgttccttggctgggaagtggtgtggaattcaccgcagcgtgatgatgactccacttcctggggtgaagcgttcaaacgccacggctcacagctgctgttagggttagtgtgggctgttgggatggcgtggctggatctgcgtttcctgttctggctggcaccgattgtcttctcgttgatcctgtcaccgtttgtttcggtgatttccagccgtgccaccgttggtctgcgcaccaaacgctggaaactgttcctgatcccggaagagtattcgccgccgcaggtgctggttgataccgatcggttccttgagatgaatcgtcaacgctcccttgatgatggctttatgcacgcagtgtttaacccgtcatttaacgctctggcaaccgcaatggcgaccgcgcgtcaccgcgccagtaaggtgctggaaatcgcccgtgaccgccacgttgaacaggcgctgaacgagacgccagagaagctgaatcgcgatcgtcgcctggtgctgctaagcgatccggtgacgatggcccgtctgcatttccgtgtctggaattccccggagagatattcttcatgggtgagttattacgaagggataaagctcaatccactggcattgcgtaaaccggatgcggcttcgcaataaaaacgtagttgcctgatgcgctacgcttatcaggcctacatcgttcctgcaatttattgattttgcaagactttgtgggtcggataaggcgttcacgccgcatccggcaaaaacaacgagccaataaaaataccggcgttatgccggtatttttttacgaaagaggtatcaaatgcgtttaattgtggtgagcatcatggtgaccttgctgagtggctgtggcagcattattagtcgcactataccggggcaggggcatggcaaccaatattatcccggtgtgcaatgggatgtgcgtgactccgcctggcgttatgtcacgatccttgatctgccattctctctggtttttgatactttactgctgccgatcgacattcatcatggcccgtatgagtgattaacgttcatcccactcatcagctgctgcgcgtccttcctcggtatccagcggtggctcaagctgaaattccccctcgtcccattcatgtaatgtattctcttcctgccactcctggcgtatctctatctcatcatagtcgccatcaaaaacactttgcgcggcttcaccgctaagcataggtaaacattcaccttcttccccttcgtcggcaaaaaactcaacttgccacatgatgtcgccgtcctgcaaaacgtatttttgggcattgaactgttgcacattcgcatcttcggcgtcgatgccggggttgtctgcaagaaattcttcgcgtgcagcgtcaatggcttcttcaagcgttgcgtacatggtcatcacgattctccctttgagttgatgaggtttcagggaaaaggatagctgattctccgcttttgcaagtatgaaaggcgaaaaatcagttgcttacctggggtattcgacgacgacgtagactgttccaactatagactgcgttgaataacactacgccagcggtgacgagaaataccgctctgaaaccgtagttcgcactaatcgctgctcccatcaatggtccggtaacgttgccaatatcacgaaagctttggttatagctgaagatacgcccggcgatctggttgctgctgttgtaaaccaacagtgtctgtacggcggggagtagtgcaccatcggcggcaccgagcaaaaaacgtaaaatcccaagttgcaatggcgtctgaacgtaagacattgggatcaacagcagtacagaaaagatcagcgctgtaatcaggatcttttcgggtccgattcgatcgccaagtttgccgagtcgtggtgcacttagcagagccgccacgcctggcacgctggcgatcatgccactgataaaggcgacgttactgacgttacccgccagttcgcggacatacagcgtcagaatgggggcaatactgcccgtcgccacctggatgattaacgtagtgacaaacaggctgagtaccagtttcgggtttttaagacttgtcaccacttcccgcatgtgcagcatctcttttttgctgaccggctggaatttttctctgatgcaaaacagggtgacgaaaaagcagagtatgagcacactggcggtaataaagaataccggacgtaagccgtagctatcggcgagcaggccgccagccattgggccgagcaacgcaccactaacgccgcctgtggagagcgtacccagcgcccagccgcttttattacgcggtacttgtgtggcgataagagcattagcgttggggacaaatccgccaagtaacccaagaagcgcccgcaggatcaaaaactgccagatattttgtgccagccccatcaacaccatcacgatgcccatgccgagggcagagcgtaatagcatgagttttcggcctttacggtcggcgagtccaccccaaaacggactggcgatggcgctaaataaaaatgtaatgctgaagacaataccggaccacatattcagggcggagtgaccggtaacgccaagctgctcaacgtagaggggtaagaagggcattaccagactgaaggcggcaccggtaagaaaacagcctagccaggcgacgatcaggtttcgtttccagtttataggggtgtcattttcacagggactcatagcaatccgctgttggtgcgccaggcgcggtgaacataagaagaaaagataagcacactaattatgcgcccgacttccagggggcgcaatccagagagcttttatcgctaaatcagggggatttgctgtggtaatgccggatgccattctgaagcatccggcatgggagatttaatagcgactaggaacgccttccgggcgtgttttaaagcgacggtgtaaccacatatactgctctggtgccatcatgatgcatttttcgaccactttgttcatccacgcggcggtagtttcggcatcatccagtggcggagaacactctggcggcagcataatcaattgataccctttgccatctggcttacggcgtggaacgaagggcaccagacatgcgccggacatccgtgccagcatccaggttccggtcgtggtcgcagcctgctcaacggcaaacaacgggacgaaaacgctactgcgcgggccgtaatcatgatccggtgcgtaccagaccacttcgccttttttcagggctttaatcatgccttttaaatctttgcggtcgagcatgcttttattactgcgcaaacggccccaggtttgtagccagtcaatcagtggattatcgttcgggcgataaacgccaatacccggttcctgcataccaaactgccgcgcacccagctccagtgtcagaaaatggatgccaactaacaggatgccgcgtttttgcgcctgcacgtcacgaatgtgttccatgccgatcacttccgtccagcgggcgattcggcggtccggccagaaccacgccatgccggtttccatcaggcccatgccaacggattcgaaattcttcaccaccattttacggcgttcttgttcgctcatttccgggaagcacagttccaggttgcgatgcacaatttttgcgcgtcgtttcataaaacgtaacgccagttttcctaatccacaaccgaggcggtagataaccgggtagggcaattgcacgactaaccaaagtacgccaatacccaaccaggttaaccaataacgcggatgaagcagtgcggtggagaacttgggtagattcgtcatatcaatcctgtttttcaacctattcgggcaattgtatgtattgtcgcattttttcgcccgcaaccaaaatttgtggctgaagactgggcgaaattgccgcgcttgtaaataacaaataatttttaatgcgcaaatgtagcgtaaaatgtgtggatgttaattatcgataattgctatatcatgccgcggatttttactttcccatctcgcaggaaccgtacaccatgccagtgttacacaaccgcatttccaacgacgcgctaaaagccaaaatgttggctgagagcgaaccgcgaaccaccattagcttttacaagtatttccacatcgccgatcctaaggcgacccgtgacgctttatatcagctgtttaccgcgctgaatgtttttgggcgagtgtatctggcgcatgagggcattaacgcgcaaatcagcgtacctgcgagcaatgttgaaacatttcgcgcgcagctctatgccttcgacccggctttagagggtttacgcctgaatatcgcgttggatgatgacgggaaatccttctgggtactgcgcatgaaggtacgcgatcgcattgttgccgacggtattgacgatcctcactttgatgccagcaatgttggtgagtatctgcaagcggcggaagtgaacgccatgcttgacgatcccgatgcactatttatcgacatgcgtaaccactatgagtatgaagtggggcactttgaaaacgcgctcgaaattccggcagataccttccgtgagcagctgccaaaagcagtcgagatgatgcaggcacataaagataaaaaaatcgtcatgtactgcaccggcggcattcgttgtgaaaaggccagtgcctggatgaaacataacggattcaacaaagtctggcatatcgagggcggaattattgaatacgcccgtaaggcgcgcgagcagggcttgccggtgcgttttattggcaaaaattttgtttttgacgagcggatgggcgaacgtataagcgatgagattatcgcgcattgccaccagtgcggcgcgccgtgcgacagccataccaactgtaaaaatgatggctgccacctgctgtttattcagtgtccagtatgcgcggaaaaatacaaaggttgttgtagtgagatttgctgcgaagaaagcgcgttaccgccagaagaacagcgacgccgtcgggcaggacgtgaaaatggcaataagatctttaataagtctcgtggacgtctgaatacaacactgtgcattcctgatccaacagaataaatatcattgccggatgcgtgccatccggcaacatttcacgcttacttctgctgtacgccttccacactaataatcagatccacttcctgagaagctggacctaaatctgtcttgatattgaagtccttgagcttaattttgccttcggcctcgaagcctgcacgtttaccaccccatgggtcgtcgccctgaccaattaatttcgcttccagcgtgacgggtttggttacgccattcagcgtcagatcgccggtaatatccagttcgtcaccgtctttcttcacgctggtggaggtgaatgttgcctgtggatattttgcggtattgaggaaatctgcactgcgaagatgtttatcgcgttcggcgtgattagtatcgacgctggtggtgttaattgtcacattcactttatcggcagccggatttttttcgtcaaaggtaaaagtaccgtcgaaatctttaaaggtgccgtataaccagctatagccaaggtgctggatgcggaaattaacaaaggcgtgctgaccttctttgtcaattttgtaatcggcggcaaccgcactaccggcagagaacatcagggacgcgaaggttaaaccaagcaggctttttttcattttttatactccatagtcagaactgctctttcccagcatgcgcttcagagtgtcgtctttatcgatgaaatgatgcttcagggccataaatccgtgcataacggacagtactacgacgctccacgcgagccaaaaatgcagggcaccggcaaagtctgcctgtgcgccagcgtcggcaagggtcgcggggacgtcaaaccagccaaaaacgctgatcggtttaccatcggcagtactgatcagatagccgctgatgccgatggcgaaaagcaataggtacaatgcgagatgtccagctcttgcggcaagacgagtcatggggctataactcggcagcggacccggcggtggagatatgacacgccacagaacgcgaataaccagccccatcattaacaaaataccgatgcttttatgcagttcgggtgctttgtgataccagccatcgtaataactgagcgtgaccatccacagacctaaagcaaacatgccgtagacaataattgcgcttagccaatggaaggccgcagatataacaccatagcgttcaggggtatttgtgaaactcataagtgcatccaaaacgaatttgcgagagaaagaaaatggcgtgtcggagaatgaattgcaacacaaaaataacaaattgaatgatatttatttttatttcaataattttgaattaataatgaaagaatcttcataagtttagtgggttcagcatcagagatgtctggtgagtgctgtagaagcaggaataatctcattcaatttttcacgctaaatgaaagggagattaaatatttgtcagtttatgtcagtgcggaaaattaaaaataaaacacatagatcagatccataattgccaacaatccccagagaaaaagataaagcatcagatgctcgcgaatattattgatgagatagtgcaacagccgacgcattaaatactcctgtaaaaacggcctcattctggaggccgtaatgatgattattggaagcgggaaagcctgaatggcgtcaaatcaaaatcgctttttttgtcttgcgcaaaatcggcagctatttcccctaaaacactcgcaaatttaaaaccgtgcccactcaggccggtaatgagcagtgtattatcgtggccgggtagggtatcgataataaaatcttcgtcagggctattatcataggtgcaggcagcgccgtacaggcagcaaccgatacccggcaatacattgcgcaagaacgggaaggcttcactcccatcactggccacttccgcaaacggaacacgttcatccgcactatggataacctggcctccgttatgtttgccaatcttcaacgcgtcgttttctgccggaaaaccataatattgatcgccattgggcagttcaccggtaaacgccgggaatttattcttcacgctatagcggccatcggcctgataccaggcaaatactttgcgtacgggctggacaggcagctccgggagcaggtcttttacccatgttcccgcgcagacaatcgcttttttcgcctgatactcaccgtcagccgtttcaatagttacgccatcatcgtcatgacgaattgcggtgaccgggcagttgaacagttgcgcacagcccgcttccttcgccagttggatccaggttttaatcgccagttcgctgcgcaaaaaaccggaatcagtttcaaataagccgatgtagttgtccgggacgcgtatttccggccagcgggccataatcccttgcgcatcgagcttttcaacgttgagttgccattgttcggcgctgtgggcgacgttggcgagaaatgtggaatcagccgggccaaggttaatgacgccagagcgtacaaaaatgggatcttcttcgttgtggcgggagagttcatcccacagcgtttgcgcgcggaggaccagcgggacatacttttcgccttcaccataagcatggcgaattaatcgcgtatcgccgtggtggctgccgtgttgatgcggtggcatatgggcgtcggtcattagcacgtttaaaccggcgcgggttgcataatacccggcggcagcgcctacggaaccgctgccaataatgatgagatcgtatttcatttttttctctctgctctcatggtttaagcagagtaattaactgaatgcagatatacaacccagaaatggtaaaggcaccggtgaggtgccttttgggtggatggtcatgtcatgttaatgacgccgatactcgtttacctggaaatcaccggattcaattttggcgattcctgcttctaatatgctaataaattgtctggcaacatcagtggttaaccagagcgtctgaccaacttcagtcccttcctgctcggacttatttggggtctggtagtgcaaacgcaacatcagcgcatcatagctatcaacggtgctgatgtcccaccctacgagcggatgagtctgaatgacttcattatttttttccatcatggccccctaattcgtgttactagacaacgttattcgaggttcaatgcgtttttatctgaagcaacttcagtataccaataagtaagggtattcaccgaatttttaaagggggaaacagataaatttctgcttttaagatttatatgaacaataaaacagcatgtcattcatatttttttagcatattgtgcaattattttgaggaagtgtagaaattttgtactcaaaattcgtaagtaaaataaaaaagccggggcgacccggcaaaaaaaatcactgcatattattcgctgacaaaccagtcatcggcgctttcccacgtttcctggagaatttcactaatgcgctgtttatcttcttttgtcgcgccaataacgcttaaattattcgctgcggcataacgtacgcttacgtggccttcattatcaggaaacgcatactgaatacggcgggaaagttcgccagccagggcgtcaatagccccagctggcaatggagaagttttcgctatggtgacttcaattcgcataatagccccctgttgaatatactggttatttatacaggtaaaataacctaatgacaacaggaagctacgatttttattgtttaacggaccagcgtaccgtttccccggcgaggaatggcaccagcgtgtcatcagtcagtgcgatgctttcagcaacctgttgctcttcacgtaccagttcgatgaatgtgtcgttgaccggcaacccatagaactgcgggccgtttacagaacagaatgcttcaaagtgctgcaaagcattcatttcttcaaagacggtagcgtaactgcccagcgcggttggggcgttgaagcagcccgcgcagccgcaactgctctctttgcgatgacgtgcatgtggcgcagaatccgtaccgaggaatactcgattaaaaccgctggcgaccagttcacgcaatgcctgttggtgaatattacgtttgaggatgggtagacaatacaggtgcggacgcacgcctccaaccagcatatggttgcggttaaacatcagatgctgcggagtgatggtggcagccagccgttcatttccgtcacggacatagtcggcagcatctttggtggtgatgtgctcaaaaacgactttcagcgcagtcaggcgctggcgcagaggttccatcacgctttctataaagcgcgcttcacgatcaaaaatgtcgatatctgcatgtgtcacttcaccatgcaccagtagcggcataccgattttttccatgcgctcaagtaccggcatgattgcgtcaatactcgtcacgccgtggctggagttagtggttgcgtttgccgggtaaagttttgcagcggtgaacacgccttcgttaaatccgcgctccagctcattaggatccaggctatctgttaaataacaggtcatcaatggggtgaaatcgtgcccggcaggtacggcgtcaagaatacgctggcgatacgccacggcagcctcaacggtggtcacgggcggagccagattgggcattacgatagcccgtccataaatttcgctggtatatggcacgacagtttttaacatgtcgccatcgcggaggtgaaggtgccagtcgtctgggcggcggatctttaatacctgggatggtgcagtcattaatctctatgctccggctgaagggatgtttttgccggacacaaaggataagcggaaacgttttcctttgcacgaaaaataaagggcgcgaatgcgccctcgtgattaatcagtaaatggaatgacaatttcgcctggcttcacttcaatgcctttcgccagttttttcgccattgcttcgccctggctgccatcttcgcgcaggacgtaagcaggttgctggttaaagtaattgcgtaatgcctggttcaaatagggaagcaacgtttgcatcaccgtttgcattttttccggttgtaccgtcgcatcgaccacttccatctctttcaggaagatcgcacctttttctttatcaaacacgggcagcgctttcagcttcagtttcatggtcgctttctgactaccgaacagggagttcatgtccagattggcgtctccggttagggtaaccttattcggctcttcgcgaccaatttggctggtcaggtttgtcagaacaatatgggcgtcagccacgccgggtaaaccgatatctttactgaaattattatgtttcgcaaggctctggttaatttcttgttcggtgatggtgtattgggtgagttgattacagccaacgagcaggccactgacgatcaatgcagcggcaaataaaaacttgttcatggtagtcctcgacatgaaatctgcgtcaatatcctgacacaacgcagcatgtgtcaccagcgataaactcgccagcagaaaaaactgaaaacggcggcaacccgcgaatacaggctgccgcggcgggtcaggattaaatcgccatactacttaacaaattgatttgtgtctgtttcgccatattatcgcggtaatcagcaacgcggcttggccagttaattccggctaccagcgtcagattacgcagtagcgggaatagctgaatatcatcttcgctaagttcgccattcacggcgttcggtttgacgatcagtttgtccagcgcacgtaaatcatcgctgatattcttaatcagaccgtcagagtgggccagcaggtcggcaaaattacccgcgctggcctctttcttgtcgacgaaatatttgcgcgcggcgggagtagaaaactcatcaaatgcgcttttggcaaaacgcggcaacagcagtttgttggcgtagccattgaccttgcgcagccactcttcaatggcaggggaacgtttgccggtcagtaacggtttgccgtcgagtttatcgacatagtgaacgatgtccatgctttctggcatatagcggctgtcatctttttgcagaatgggaacctgtttttgaccgaccatccgggtgggtgtttctgcgtcgtcgttgagcagaacatgtaattcgacggggatatttttcaggccgaaaatcatgcgggctttgaggcagtaagggcagtgatcgtaaatgtatagcttcacgtgactcctccatttggctgtcagttcactttcagtatgaaggagtcaggggggagtatcaaatcaggcgtcgcgttcaagcaaacgacgcgcggcgcgtttctggctaaactgccaacccagcgcaaggaaagtgaagatgccaataatgcccagcatcatccacggaagctctggctggtgcgcgcttttgcccaggtcaaacagccagccgccaccgatataaccaatagcgccgccaatcgccagacccagacggctaaaccccatatagctgccgcgagctcttgcgtccgccaggctagcacttaaggtttcacgcgcaggctcggcaatgatgctcccgatataaaacagacaaatcagggtgaaaagttgttgcaggccgctgaccatgcccaccggcatcatgcttaaactcattatcaacagcccagccatcaaccggtgttccagacgaaaatgcttttcactccagcgggcgatagggtagagcaacgttaagctcagacacgcttcaatggcatacatccatttaacggcagagggcgcgccagccacgtcgttgaccataattggcagcatcagcatcacttgtacagccagcatgtagtaacccgccagcgtcagaacataggtgacaaaacgcttgtcacgcatcacgcgggtcatgccttcgcgaacgggcgtgcgtacggtggagagtttccatgctggtaacaaccacgcattgaacgccgcacatagcacaaatagaactgcccctgtggcgcagaccaggcgaaagtcgtattgcaacagccagctccccaacaatgcgccaatgaccgcaccggcactgtcctgcatcatcaacaggctgaaaaaacgaccacgctgctgtggacggattaatttcaccaccagcgcgctacgcggcggatcaaacaacgtgccaccgagtccgctgagcaggcaactaaaccacaatagccacggttcgtgggcgatacccattgtggcgaatccggcggcgcgcatcagcataccggtaacaatcatcggtttggcaccaaagcggtcggcaattgcaccgccgaaaatacccagaccttgctgaataaattggcgtagaccgagagcaataccgaccatgacggcggcccagcccatttgatcaacgaagcggatagagatcagcgggaagacaacaaagaaccccagcacgaccagcatattatcgatgagcaggaaatatttacccaggttcctcgcctggctcacgcgggacatttcccctcccgggaaataaaagatgagcactttctattctgcattgccgctaagacttttcccatcacttcggggacaatatttttttatcaaaacgtcgctttgatagagagtttttatcaaatatgtgaataatgcagaaaatggcattttggacttttcacagggtctggttgcgcaggtatagtaatacttacagcgtattaaagacgttacgggaaggagtaggtatagaatgtttggctatcgcagtaacgtgccaaaagtgcgcttaaccacagaccgactggtcgtgcgtctggtgcatgatcgtgatgcctggcgtcttgcggattattacgcagagaatcgccatttcctcaagccctgggagccagtgcgcgacgaaagccactgttatccaagtggctggcaggccaggctggggatgattaacgaatttcataaacaaggtagtgctttctactttggcttattcgacccggacgaaaaagagattattggcgttgccaatttttccaatgttgttcgtggctcttttcatgcctgctatctcggttatagcattgggcaaaaatggcagggcaaaggactcatgtttgaagccctgaccgcagccattcgttatatgcagcgcacccaacatattcatcgcattatggctaattatatgccgcacaataaacgcagcggtgatttactggcgcgactgggttttgaaaaagaaggctatgcgaaagactatctgttgattgatggacaatggcgcgatcacgtactgacggcattaactaccccagactggacgcccggccgctaaggagaatctcatgaaatatcaacttactgcccttgaagctcgcgtgattggttgcttgctggaaaagcaggtgaccacgccggagcaatacccgctcagtgtcaatggtgtagtcacggcctgtaatcagaaaacgaaccgtgaaccggtcatgaatctgagtgaatccgaagtgcaggaacagctggataatctggtcaaacgtcattatctacgcacagtgagcggttttggtaatcgggtcaccaaatatgagcaacgtttttgtaatagtgaatttggcgatctgaaactgagcgcagcggaagtggcgttaatcaccacgttgttattgcgtggtgcccagacgccaggtgaactgcgcagccgcgccgcgcgaatgtatgaattcagcgatatggcggaagtggagagcacgctggaacaactggcaaatcgcgaagatggtccttttgtggtgcgtctggcccgcgaaccgggtaaacgcgaaaaccgctacatgcatcttttcagtggtgaggttgaagatcagccggcggtgacggatatgagcaacgcggttgacggtgatttacaggcccgcgtcgaagccctggaaatcgaagtggcagaactgaaacagcgtcttgatagcttgctggcccatctgggagattaaagtgaaaaaattacgtatcggcgtagtgggattaggtggcattgcgcaaaaagcgtggttaccggtgctggcggcagcgtctgactggacgttacaaggagcctggagccctacgcgcgcgaaagccctgccaatttgtgaaagctggcgcattccttatgccgatagcttatccagccttgccgccagttgcgatgcggtttttgtgcattccagcaccgccagccactttgacgtggtcagtacgttactcaatgcgggggtacatgtctgtgtcgataaaccgctggcagaaaatctgcgcgatgctgaacggctggtggaactggcggcgcggaaaaaactgacgttgatggtcggttttaaccgtcgtttcgcaccactctacggtgagttaaaaacgcaactcgccaccgcagccagcctaagaatggataaacatcgtagcaatagcgtcgggccacacgatctttatttcacgttgctggatgattatctgcatgtggtggataccgcgctgtggttgagcggcggcaaagcctctctggatggcggtacgctactgactaacgacgctggcgaaatgctgtttgccgagcaccattttagcgctggtcctttgcagatcaccacctgtatgcatcgccgtgccggaagtcagcgtgaaaccgtgcaggccgtgactgacggtgcgctcatcgacattacggatatgcgcgaatggcgtgaggagcgcgggcagggcgtagtgcataaaccgattcctggttggcagagtacgcttgagcaacgtgggtttgtcggctgtgcgcggcacttcattgaatgtgtgcaaaaccagacagttccgcaaaccgccggcgaacaggccgtgctggcgcaacgtatcgttgacaagatctggcgcgatgcgatgagtgaataaaccctgtaacatctggcggtagcaattcaccataatccaggtagactattcgcctctttcagcgcctgccttgcaggcgttttgcccgtgggtctggattagaacaccgatgaatttattaaaaagcctggccgccgtcagcagcatgaccatgtttagccgtgtgcttggcttcgcacgagacgcaattgtcgccagaatctttggcgcagggatggcaaccgacgcctttttcgtcgcttttaaacttcctaacttgttacgccgtatctttgccgaaggggcattttcccaggcatttgtaccgattctggcggaatataaaagtaagcagggtgaagacgccacgcgggtctttgtctcttatgtttctggcctgctgacacttgcgctggcggttgtgacggtcgctggcatgctcgccgcaccgtgggtgatcatggtgaccgcgccaggcttcgctgacacagctgacaaatttgccctgaccagccagctactaaagattacctttccctatatcttgctgatctccctggcgagcctggtgggagcgattctgaatacgtggaaccgcttcagcattccggcgtttgctccaacactgcttaacatcagcatgattggtttcgcgctgtttgccgcaccgtactttaacccaccggtgctggcgctggcgtgggctgttacggtcggcggcgtcctgcagctggtgtatcagctaccgcacctgaagaagatcggcatgctggtcctgccgcgcattaacttccacgatgccggagcaatgcgcgtggtgaaacagatgggaccggcgatccttggcgtctctgtgagccagatctccttaatcatcaacaccatttttgccagctttcttgcttccggtagcgtgtcttggatgtattacgccgaccgcttaatggagtttccgtccggtgtgctgggcgtggcgcttggcaccattttgctgccgagcctgagcaaaagttttgccagtggcaatcatgatgaatacaaccgtttgatggactgggggttgcgtctttgtttcctgttggcgctgccgagtgcggttgcgttgggcattctttccggtccgttgaccgttagcctgttccagtacggtaaatttaccgcgtttgatgcgctgatgacccagcgggcgttaattgcctacagcgtgggtttgattggcctgattgtagtgaaagtgttggctcctggcttttattcccgccaggacattaaaacgccagtgaaaattgccatcgttacgctgattttaacgcaattgatgaacctggcgtttattggtccgttgaaacatgccgggctgagtctttctattggtctggcggcgtgtctgaatgctagcctgctttactggcagttgcgtaagcagaaaatctttaccccgcaacccggctggatggcgtttctgttgcgtctggtggtggcggtactggtgatgtctggcgtgcttttaggtatgttacatatcatgccggagtggagtttgggtaccatgccctggcgtttactgcgtttaatggcggtcgtgctggcggggattgccgcgtacttcgctgcactggcggtactgggcttcaaagttaaagaatttgcccgccggacggtgtaacaatgcattccggcctgcagtgttcgctttaaaacatatcatgaaactgggtatgttttgtctgcctgctctgggatcgctggggcgggcatttttttgcctattttgcattgttggttagcaaggatgccattcgatgaattttaatatgttgattcaaagatgaaataaaaaagccctggcagttaccagggcttgattactttgagctaattattactcaacaggttgcggacgcgcaggagcggcagaggcatgatgtgttgccgtatgaccacctgcggcacctttaccttcgaaggcaaaagtagggcgctgccagtcactgtgacgcggtgcctccggaacatattccggtgctggagcgcgcgtcattggcgcggtagcgtggttatgctcaacggtgacctcaggttcgaccgcagctaccgtttcaacttctgctgcgacttcagcgactactggcgcggcaggttgagcaacaacttcaggttcagcaactacaacctcagcagtttcgacaacttcttcaatatctgccgtctcttcctgcggttcaaccaccggttctgcttgttctgcaacttcctgggctacggcaacatcagactcggtaatcacctgcggctgttcagttaccgcggcagcgatcacttcaggatgcgtcgtttcaaccacttccggttgcggttcggcaacctgaacgggggcttctacgacaccggccacttcttcaacaactggcgcgctaacaaccggttcgatagcggcggcgacagggacctcagtcaccatcggctgcacatgtacttcttcctgttcgcgctgctcttcaacctgtacatcttgcggacgtacaattggatagcggatccagactttgccagaggccagttccggagacgcgcacgctacggtcaacggcattgggctctgggttggataacgctcgtcacgatagcgacgacgacgctgaccacttacgcgcaggtgacgagggctgcggcgagaacgacgcggcatgccaccgttgtcacggttatcagcattgttctcttcttgctgttctggtgcagtttgcgctacgactggcagcgggactttcaccagttctgtgcgtggagctggcgcttcctgaacaattggttcggcagcgacagtttcttcaaccaccggtgcgactaccgcttcttcggctacgctttgctcgtaacgcactttctgattgagctgacgctgtttacgacgcggctgaaccggacgtacacgttcttcctgttcggtttcctgaacagattgctcttcaacattcagcgccttcgcttcttgttgcgcctgacgtttatcatcattacggcggcggctacgttcacgacgcggcgcttgctgctcgtcggcggtacgcgctttttccgttacctcagcctgctgacggctctcacgcgtctcggcagtctgctgctgtgcctggcgacgattacgacggttttcttcgcgattatcgctgccttcagtacgttcactacgggtgtcgcggcgctcattacggtcacggcggttgttctgacgaggcttgcgacgatcctgttgacgttccggtttcgcttctgctttcggtgctggttgctcggtcggtttggtttcttcaccaccgctgaacagcgctttcagtgcgccgaagaagcggctcaacagcccaggttgtgcaggagctgctggtgttgccggtgcagctttcggtgctggagctacaacaggcgcggcaggttcagctggcgttggcgcaggcggcacatccggcatggcaaaggttgccagcgcaggttgttccggacgcttacgttcagcgaactcttcttcagacggcagcgccatcgcttcttcatgcagcttcggcagcatgtagcttaaggttggggtttcttcccctttacgcacgcgcagcacgtggtagtgcggggtttccatctgatcgtttggcacaattacacagcgcacaccgtcctgacgagtttcaatggcatttaccgcagaacgtttttcattcagcaggtaagaagcgattggcacaggaacaatggcgtgaacttcctgggtgttctctttcagcgcttcttcttcgatcagacgcagaatagagaggctcaggctttcgttgtcacgcacggtgccagtaccagaacaacgcggacaaacgtgatgactggattcacccagacttgggctcaggcgctgacgggacatttccagcaggccaaagcgagaaatatggctgatttgaatacgcgcacggtcctgacgcaccgcttcacgcagacggttttctaccgcacgctggtggcgtactggcgtcatgtcgatgaagtcgataacaatcaggccgccgaggtcacgcaggcgcagctgacgagcaatctcatcggcagcttcgaggttagtgttaaacgcggtttcttcgatatcgccgccgcgggtcgcgcgtgcggagttgatgtcgatggccgttaacgcttcggtgctgtcgataacaatggaaccaccagacggcagacgaacttcacgctggaaggcggactcgatctgactctcgatctggtagtggctgaacagcgggatctcgccggtgtacagtttgattttgctgctgaaatccgggcgacctaatgcagcgatatgctgacgtgccagttcgagcactttcgggttatcgataaggatttcgccgatgtcctgacgtaagtaatcgcggaatgcgcgaacgattacgttgctctcctgatgaatcaggaacggggccgggcggctttcagcggcttttttgatggcttcccagtgtttcagacggaagcttaaatcccattgcagcgcctcagcagatttgccgacgccagcggtgcgcacgataagccccatgccttccggcagttcaaggcttgccagtgcttcttttaattcggtacggtcgtcgccttcgatacggcgagaaatgccacccgcgcgcgggttgttcggcatcagaaccagatagctacccgccagactgataaaggtggttaatgccgcgcctttgttgccgcgctcttctttatcgatctgaacaatgacttcctgaccttcacgcaacacatctttaatgttgggacgaccatgagcactgtagttagcagggaaatattcgcgggcaatttcttttagtgggaggaaaccgtgacgttcagcgccgtaatcaacaaaagcagcttccagactcggttcaatgcgggtgattttacctttgtagatgtttgcctttttctgctcgtgccctggactttcgatatccaggtcatacagacgctgcccatctacaagggcaacgcgcaactcttcctgctgagttgcgttgattaacattcttttcatcgtaacttactcattattcttacattgacgactaagctgcgggcaaagtaacgcctttccgggtgtgaaccgatggcctcgtgtctagtcgcgtcgccaacctcacggttatcgtcagctcaaagaggcgcagagtgtgagttgcccgtttttcatgcggaaaaacagcgcaattatcaaagaaacagactgggtattactctccagaaatatttccatctaccggtaaggactgcaacccgcagcccgctaactgcctgaaagatcaatacgtcttacgccattgctgcgtggatgatcggtcgggcaaaatgggttattccgtaaaatttcttgttttaacaaggatggacacggaaacggcctcattattccactgcaagccttgttatagcaagatgacttttaccatttatcacccgcttactcacagttttttcacttcttgctggtgattggtttaataaccatcaataaagtgatcacgcagtgaagtaataaggtgcaaaagtaaatataagcatagaaaaatgagtggcgcgaatcctgttggctaattagaatcgccaaccatgaaaacagagactccatccgtaaaaattgttgctatcaccgctgacgaagcggggcaacgtatcgataactttttgcgtacccaattgaaaggcgtaccaaaaagtatgatttaccgtattttgcgtaaaggcgaagtgcgggtgaacaaaaaacgtattaagcctgaatataaactcgaagcgggtgatgaggtgcgtattccaccggttcgcgttgctgagcgggaagaagaggcggttagcccacatctgcaaaaggtggcggcgctggcggacgtcatcttatatgaagatgatcacatcctggtgctgaataaaccttccggtacggcggtacatggcggcagtggtttaagcttcggcgttattgaaggtttgcgggcgttgcgcccggaagcgcggttccttgaactggttcatcgtcttgaccgggacaccagtggtgttttgctggtagcgaaaaaacgcagcgcgttgcgttctctgcatgagcaattacgtgaaaaagggatgcaaaaagattacctggcgctggtgcgcggtcagtggcagagccatgtgaagagcgttcaagcaccgttactgaaaaatattctgcaaagcggcgaacgtatcgtgcgtgtgagtcaggaaggcaaaccgagcgaaacacgctttaaagtggaagaacgctatgcatttgccaccctggtgcgttgtagcccggtaacagggcgtactcaccagatccgtgtgcatacacaatatgcgggtcatccgattgcctttgacgatcgctacggtgaccgtgaatttgacaggcagctcactgaagcaggcacgggattaaatcgcctgttcctgcacgctgcagcgttgaagtttactcatccggggaccggtgaggtgatgcgtatcgaagctccgatggatgaaggtttgaagcgttgtttgcaaaagctgcgtaacgcgcgctaatacaagcatataaacctgataatgggcggttggcctgataaggcgtttacgccgcatcaggccgccagcaccgattgccggatgcgacgtaaccacatccggcgcaaaaaattatcccatcagcgggtttttcccttcccgacgtaacatctgacacagcgcgattagcggtaaaccaaccagcgtgttaggatcacgcccctctaaacgctcaaacagcgtaatgccaaatccttcactcttaaagctacccgcgcagtgcaggggatgctctttacgcacgtaattatcaatctccgcctcgctcaggtgacggaaatggacgtcaaaaggctccacttctgtttgcagatgcccattcgcgctattaaacaacgccagtccagtatagaaggtgacgatattgccgctggctttgcgtaattgcagacgggcattttcttccgttaacggtttaccggtgatttcgccatcaagaacacatacctggtcactaccaataattaaatgatccggataacgactcgccagagattgcgctttttcttgtgccagtcgaagcaccaactgtcgcggactttcgtcgctgcgtggggtttcgtcgacctctggtgctgcacattcaaaagagatttgcagtttttccagaagagcgcgacgccatgggctggtggaggctaaaataagtttaggcatatttttttccatcagatatagcgtattgatgatagccattttaaactatgcgcttcgttttgcaggttgatgtttgttatcagcactgaacgaaaataaagcagtaacccgcaatgtgtgcgaattattggcaaaaggcaaccacaggctgcctttttctttgactctatgacgttacaaagttaatatgcgcgccctatgcaaaaggtaaaattacccctgactctcgatccggttcgtacggctcaaaaacgccttgattaccagggtatctatacccctgatcaggttgagcgcgtcgccgaatccgtagtcagtgtggacagtgatgtggaatgctccatgagcttcgctatcgataaccaacgtctcgcagtgttaaacggcgatgcgaaggtgacggtaacgctcgagtgtcagcgttgcgggaagccgtttactcatcaggtctacacaacgtattgttttagtcctgtgcgtagtgacgaacaggctgaagcactgccggaagcgtatgaaccgattgaggttaacgaattcggtgaaatcgatctgcttgcaatggttgaagatgaaatcatcctcgccttgccggtagttccggtgcatgattctgaacactgtgaagtgtccgaagcggacatggtctttggtgaactgcctgaagaagcgcaaaagccaaacccatttgccgtattagccagcttaaagcgtaagtaattggtgctccccgttggatcggggataaaccgtaattgaggagtaaggtccatggccgtacaacagaataaaccaacccgttccaaacgtggcatgcgtcgttcccatgacgcgctgaccgcagtcaccagcctgtctgtagacaaaacttctggtgaaaaacacctgcgtcaccacatcactgccgacggttactaccgcggccgcaaggtcatcgctaagtaatcacgcatctgcgtgatgaagcttagtgaggattttccccaggcaactggggaaagaccaaaccgggcggcgacgataccttgacacgtctaaccctggcgttagatgtcatgggaggggattttggcccttccgtgacagtgcctgcagcattgcaggcactgaattctaatagccaactcactcttcttttagtcggcaattccgacgccatcacgccattacttgctaaagctgactttgaacaacgtagccgtctgcagattattcctgcgcagagtgttatcgccagtgatgcccggcctagccaagctatccgcgccagtcgtgggagtagtatgcgcgtggccctggagctggtgaaagaaggtcgagcgcaagcctgtgtcagtgccggtaataccggggcgctgatggggctggcaaaattattactcaagcccctggaggggattgagcgtccggcgctggtgacggtattaccacatcagcaaaagggcaaaacggtggtccttgacttaggggccaacgtcgattgtgacagcacaatgctggtgcaatttgccattatgggcagtgttctggctgaagaggtggtggaaattcccaatcctcgcgtggcgttgctcaatattggtgaagaagaagtaaagggtctcgacagtattcgggatgccagtgcggtgcttaaaacaatcccttctatcaattatatcggctatcttgaagccaatgagttgttaactggcaagacagatgtgctggtttgtgacggctttacaggaaatgtcacattaaagacgatggaaggtgttgtcaggatgttcctttctctgctgaaatctcagggtgaagggaaaaaacggagctggtggctactgttattaaagcgttggctacaaaagagcctgacgaggcgattcagtcacctcaaccccgaccagtataacggcgcctgtctgttaggattgcgcggcacggtgataaaaagtcatggtgcagccaatcagcgagcttttgcggtcgcgattgaacaggcagtgcaggcggtgcagcgacaagttcctcagcgaattgccgctcgcctggaatctgtatacccagctggttttgagctgctggacggtggcaaaagcggaactctgcggtaacaggacgctgccagcgaactcgcagtttgcaagtgacggtatataaccgaaaagtgactgagcgtacatgtatacgaagattattggtactggcagctatctgcccgaacaagtgcggacaaacgccgatttggaaaaaatggtggacacctctgacgagtggattgtcactcgtaccggtatccgcgaacgccacattgccgcgccaaacgaaaccgttagtaccatgggctttgaagcggcgacacgcgcaattgagatggcgggcattgagaaagaccagattggcctgatcgttgtggcaacgacttctgctacgcacgctttcccgagcgcagcttgtcagattcaaagcatgttgggcattaaaggttgcccggcatttgacgttgcagcagcctgcgcaggtttcacctatgcattaagcgtagccgatcaatacgtgaaatctggggcggtgaagtatgctctggtcgtcggttccgatgtactggcgcgcacctgcgatccaaccgatcgtgggactattattatttttggcgatggcgcgggcgctgcggtgctggctgcctctgaagagccgggaatcatttccacccatctgcatgccgacggtagttatggtgaattgctgacgctgccaaacgccgaccgcgtgaatccagagaatagtattcatctgacgatggcgggcaacgaagtcttcaaggttgcggtaacggaactggcgcacatcgttgatgagacgctggcggcgaataatcttgaccgttctcaactggactggctggttccgcatcaggctaacctgcgtattatcagtgcaacggcgaaaaaactcggtatgtctatggataatgtcgtggtgacgctggatcgccacggtaatacctctgcggcctctgtcccgtgcgcgctggatgaagctgtacgcgacgggcgcattaagccggggcagttggttctgcttgaagcctttggcggtggattcacctggggctccgcgctggttcgtttctaagataaggattaaaacatgacgcaatttgcatttgtgttccctggacagggttctcaaaccgttggaatgctggctgatatggcggcgagctatccaattgtcgaagaaacgtttgctgaagcttctgcggcgctgggctacgacctgtgggcgctgacccagcaggggccagctgaagaactgaataaaacctggcaaactcagcctgcgctgttgactgcatctgttgcgctgtatcgcgtatggcagcagcagggcggtaaagcaccggcaatgatggccggtcacagcctgggggaatactccgcgctggtttgcgctggtgtgattgatttcgctgatgcggtgcgtctggttgagatgcgcggcaagttcatgcaagaagccgtaccggaaggcacgggcgctatggcggcaatcatcggtctggatgatgcgtctattgcgaaagcgtgtgaagaagctgcagaaggtcaggtcgtttctccggtaaactttaactctccgggacaggtggttattgccggtcataaagaagcggttgagcgtgctggcgctgcctgtaaagcggcgggcgcaaaacgcgcgctgccgttaccagtgagcgtaccgtctcactgtgcgctgatgaaaccagcagccgacaaactggcagtagaattagcgaaaatcacctttaacgcaccaacagttcctgttgtgaataacgttgatgtgaaatgcgaaaccaatggtgatgccatccgtgacgcactggtacgtcagttgtataacccggttcagtggacgaagtctgttgagtacatggcagcgcaaggcgtagaacatctctatgaagtcggcccgggcaaagtgcttactggcctgacgaaacgcattgtcgacaccctgaccgccagcgcgctgaacgaacctagtgcgatggcagcggcgctcgagctttaaaagaggaaaatcatgaattttgaaggaaaaatcgcactggtaaccggtgcaagccgcggaattggccgcgcaattgctgaaacgctcgcagcccgtggcgcgaaagttattggcactgcgaccagtgaaaatggcgctcaggcgatcagtgattatttaggtgccaacggcaaaggtctgatgttgaatgtgaccgacccggcatctatcgaatctgttctggaaaaaattcgcgcagaatttggtgaagtggatatcctggtcaataatgccggtatcactcgtgataacctgttaatgcgaatgaaagatgaagagtggaacgatattatcgaaaccaaccttagttctgttttccgtctgagtaaagcggtaatgcgcgctatgatgaaaaagcgtcatggtcgtattatcactatcggttctgtggttggtaccatgggaaatggcggtcaggccaactacgctgcggcgaaagcgggcttgatcggcttcagtaaaagtctggcgcgcgaagttgcgagtcgcggtattactgtaaacgttgttgctccgggctttattgaaacggacatgacacgtgcgctgagcgatgaccagcgtgcgggtatcctggcgcaggttcctgcgggtcgcctcggcggcgcacaggaaatcgccaacgcggttgcattcctggcatccgacgaagcagcttacatcacgggtgaaactttgcatgtgaacggcgggatgtacatggtctgaccgcgatttgcacaaaatgctcatgttgcgcgcagtctgcgtggttatgagtaataattagtgcaaaatgatttgcgttattggggggtaaggcctcaaaataacgtaaaatcgtggtaagacctgccgggatttagttgcaaatttttcaacattttatacactacgaaaaccatcgcgaaagcgagttttgataggaaatttaagagtatgagcactatcgaagaacgcgttaagaaaattatcggcgaacagctgggcgttaagcaggaagaagttaccaacaatgcttctttcgttgaagacctgggcgcggattctcttgacaccgttgagctggtaatggctctggaagaagagtttgatactgagattccggacgaagaagctgagaaaatcaccaccgttcaggctgccattgattacatcaacggccaccaggcgtaagtgaacatctccaggcggtcgttcgaccgcctgagttttatctttttgtcccactagaatcattttttccctccctggaggacaaacgtgtctaagcgtcgtgtagttgtgaccggactgggcatgttgtctcctgtcggcaataccgtagagtctacctggaaagctctgcttgccggtcagagtggcatcagcctaatcgaccatttcgatactagcgcctatgcaacgaaatttgctggcttagtaaaggattttaactgtgaggacattatcagccgcaaagaacagcgcaagatggatgccttcattcaatatggaattgtcgctggcgttcaggccatgcaggattctggccttgaaataacggaagagaacgcaacccgcattggtgccgcaattggctccgggattggcggcctcggactgatcgaagaaaaccacacatctctgatgaacggtggtccacgtaagatcagtccattcttcgttccgagtacgattgtgaacatggtggcaggtcatctgactatcatgtatggcctgcgtggcccgagcatctctatcgcgactgcctgtacttccggcgtgcacaacattggccatgctgcgcgtattatcgcgtatggcgatgctgacgtgatggttgcaggtggcgcagagaaagccagtacgccgctgggcgttggtggttttggcgcggcacgtgcattatctacccgcaatgataacccgcaagcggcgagccgcccgtgggataaagagcgtgatggtttcgtactgggcgatggtgccggtatgctggtacttgaagagtacgaacacgcgaaaaaacgcggtgcgaaaatttacgctgaactcgtcggctttggtatgagcagcgatgcttatcatatgacgagtccgccagaaaatggcgcaggcgcagctctggcgatggcaaatgctctgcgtgatgcaggcattgaagcgagtcagattggctacgttaacgcgcacggtacttctacgccggctggcgataaagctgaagcgcaggcggtgaaaaccatcttcggtgaagctgcaagccgtgtgttggtaagctccacgaaatctatgaccggtcacctgttaggtgcggcgggtgcagtagaatctatctactccatcctggcgctgcgcgatcaggctgttccgccaaccatcaacctggataacccggatgaaggttgcgatctggatttcgtaccgcacgaagcgcgtcaggttagcggaatggaatacactctgtgtaactccttcggcttcggtggcactaatggttctttgatctttaaaaagatctaagttgtcattttccacccttataaaaggtccgcttgcgggccttttttcttagcttttattccgacttgttccgtagtgaacatgctgccacactaacaattctctgataaggagccggtatgttcttaattaacggtcataagcaggaaagcctggcagtaagcgatcgggcaacgcagtttggtgatggttgttttaccaccgccagagttatcgacggtaaagtcagtttgttaagcgcgcatatccagcgactacaggatgcttgtcagcggttgatgatttcctgtgacttctggcctcagcttgaacaagagatgaaaacgctggcagcagaacagcaaaatggtgtgctgaaagtcgtgatcagtcgcggtagtggcgggcgagggtacagcacattgaacagcggaccggcaacgcggattctctccgttacggcttatcctgcacattacgaccgtttgcgtaacgaggggattacgttggcgctaagcccggtgcggctggggcgcaatcctcatcttgcaggtattaaacatctcaatcgtcttgagcaagtattgattcgctctcatcttgagcagacaaacgctgatgaggcgctggtccttgacagcgaagggtgggttacggaatgctgtgcggctaatttgttctggcggaagggcaacgtagtttatacgccgcgactggatcaggcaggtgttaacggcattatgcgacaattctgtatccgtttgctggcacaatcctcttatcagcttgtcgaagtgcaagcctctctggaagagagcttgcaggcagatgagatggttatttgtaatgcgttaatgccagtgatgcccgtatgtgcctgtggcgatgtctcctttagcagtgcaacgttatatgaatatttagccccactttgtgagcgcccgaattaatcatgaaaaaagtgttattgataatcttgttattgctggtggtactgggtatcgccgctggtgtgggcgtctggaaggttcgccatcttgccgacagcaaattgcttatcaaagaagagacgatatttaccctgaagccagggaccggacgtctggcgctcggtgaacagctttatgccgataagatcatcaatcgtccacgggtttttcaatggctgctgcgtatcgaaccggatctttctcactttaaagccgggacttaccgctttacaccgcagatgaccgtgcgcgagatgctgaaattgctggaaagcggtaaagaagcacagttccctctgcgactggtagaagggatgcgtctgagcgattacctcaagcaattgcgtgaggccccgtatatcaagcatacgctgagcgatgataagtacgccaccgtagcgcaggcacttgaactggaaaacccggagtggattgaaggttggttctggccagacacctggatgtataccgccaataccaccgatgtcgcgttactcaagcgagcgcacaagaaaatggtgaaagcggtcgatagcgcctgggaagggcgtgcggacggtctgccttataaagataaaaaccagttggtgacgatggcaagtattatcgaaaaagaaaccgccgttgccagtgaacgcgataaggttgccagtgtatttatcaaccgtttacgcattggtatgcgcctgcagaccgacccgaccgtgatttacgggatgggagagcgttataatggcaaactttctcgtgcagacctggaaacgccgacagcgtataacacctataccattaccggtctgccgccaggtgcgatagcgacgccgggggcggatagcctgaaggctgctgcgcatccggcaaaaacgccgtatctctattttgtggccgatggtaaaggtggtcacacgtttaataccaatcttgccagtcataacaagtctgtgcaggattatctgaaagtgcttaaggaaaaaaatgcgcagtaagtatatcgtcattgaggggctggaaggcgcaggcaaaactaccgcgcgtaatgtggtggttgagacgctcgagcaactgggtatccgcgacatggttttcactcgggaacctggcggtacgcaacttgccgaaaagttaagaagcctggtgctggatatcaaaagcgtaggcgatgaagtcattaccgataaagccgaagttctgatgttttatgccgcgcgcgttcaactggtagaaacggtcatcaaaccagctctggctaacggcacctgggtgattggcgatcgccacgatctctccactcaggcgtatcagggcggcggacgtggtattgaccaacatatgctggcaacactgcgtgatgctgttctcggggattttcgccccgacttaacgctctatctcgatgttaccccggaagttggcttaaaacgcgcgcgtgcgcgcggcgagctggatcgtattgagcaagaatctttcgatttctttaatcgcacccgcgcccgctatctggaactggcagcacaagataaaagcattcataccattgatgccacccagccgctggaggccgtgatggatgcaatccgcactaccgtgacccactgggtgaaggagttggacgcatgagatggtatccatggttacgacctgatttcgaaaaactggtagccagctatcaggccggaagaggtcaccatgcgctactcattcaggcgttaccgggcatgggcgatgatgctttaatctacgccctgagccgttatttactctgccaacaaccgcagggccacaaaagttgcggtcactgtcgtggatgtcagttgatgcaggctggcacgcatcccgattactacaccctggctcccgaaaaaggaaaaaatacgctgggcgttgatgcggtacgtgaggtcaccgaaaagctgaatgagcacgcacgcttaggtggtgcgaaagtcgtttgggtaaccgatgctgccttactaaccgacgccgcggctaacgcattgctgaaaacgcttgaagagccaccagcagaaacttggtttttcctggctacccgcgagcctgaacgtttactggcaacattacgtagtcgttgtcggttacattaccttgcgccgccgccggaacagtacgccgtgacctggcttagtcgcgaagtgacaatgagtcaggatgcattacttgccgcattgcgcttaagcgccggtagccctggcgcggcactggcgttgtttcagggagataactggcaggctcgtgaaacattgtgtcaggcgttggcatatagcgtgccaagcggcgactggtatagcctgctagcggcccttaatcatgaacaagctccggcgcgtttacactggctggcaacgttgctgatggatgcgctaaaacgccatcatggtgctgcgcaggtgaccaatgttgatgtgccgggcctggtcgccgaactggcaaaccatctttctcccagccgcctgcaggctatactgggggatgtttgccacattcgtgaacagttaatgtctgttacaggcatcaaccgcgagcttctcatcaccgatcttttactgcgtattgagcattacctgcaaccgggcgttgtgctaccggttcctcatctttaagagagacatcatgtttttagtcgacagtcactgccatctcgatggtctggattatgaatctttgcataaggacgtggatgacgttctggcgaaagccgccgcacgcgatgtgaaattttgtctggcagtcgccacaacattaccgggttatttacatatgcgggatctggtaggcgaacgtgacaacgtcgtattttcttgtggcgtgcatccactcaaccagaatgatccctacgatgtagaagatttacgccgtctggcggcagaagagggtgttgtagcgctgggtgaaaccgggctggattattattacacgccggaaactaaagtacgtcagcaagagtccttcatccatcatatccagattggtcgtgaactgaacaagccggttatcgtccatacccgtgacgcccgtgccgatacgctggcaattctgcgcgaagaaaaagtgacggattgcggtggcgtactacactgttttacagaggacagagaaacggcgggtaaattactggatctcggattttacatctccttttccggcattgtgaccttccgtaatgcggagcaactgcgcgatgctgcgcgttatgtccccctggatcggttactggtggaaactgacagtccttaccttgcgccggtaccgcatcgaggaaaagagaatcaacctgcgatggttcgtgacgttgcagaatacatggctgtgttgaaaggtgttgccgttgaagaactggcgcaggtaaccaccgataacttcgcccgtctgtttcacatcgacgcttcccgccttcaatccatccgttgaatgagtttttttaaagctcgtaattaatggctaaaacgagtaaagttcaccgccgaaaattgggcggtgaataaccacgtttgaaatattgtgacatatgttttgtcaaaatgtgcaacttctccaatgatctgaagttgaaacgtgatagccgtcaaacaaattggcactgaattattttactctgtgtaataaataaagggcgcttagatgccctgtacacggcgaggctctccccccttgccacgcgtgagaacgtaaaaaaagcacccatactcaggagcactctcaattatgtttaagaatgcatttgctaacctgcaaaaggtcggtaaaagcctgatgctgccggtatccgtactgcctatcgcaggtattctgctgggcgtcggttccgcgaatttcagctggctgcccgccgttgtaagccatgttatggcagaagcaggcggttccgtctttgcaaacatgccactgatttttgcgatcggtgtcgccctcggctttaccaataacgatggcgtatccgcgctggccgcagttgttgcctatggcatcatggttaaaaccatggccgtggttgcgccactggtactgcatttacctgctgaagaaatcgcctctaaacacctggcggatactggcgtactcggagggattatctccggtgcgatcgcagcgtacatgtttaaccgtttctaccgtattaagctgcctgagtatcttggcttctttgccggtaaacgctttgtgccgatcatttctggcctggctgccatctttactggcgttgtgctgtccttcatttggccgccgattggttctgcaatccagaccttctctcagtgggctgcttaccagaacccggtagttgcgtttggcatttacggtttcatcgaacgttgcctggtaccgtttggtctgcaccacatctggaacgtacctttccagatgcagattggtgaatacaccaacgcagcaggtcaggttttccacggcgacattccgcgttatatggcgggtgacccgactgcgggtaaactgtctggtggcttcctgttcaaaatgtacggtctgccagctgccgcaattgctatctggcactctgctaaaccagaaaaccgcgcgaaagtgggcggtattatgatctccgcggcgctgaccagcttcctgaccggtatcaccgagccgatcgagttctccttcatgttcgttgcgccgatcctgtacatcatccacgcgattctggcaggcctggcattcccaatctgtattcttctggggatgcgtgacggtacgagcttcagccacggtctgatcgacttcatcgttctgtctggtaacagcagcaaactgtggctgttcccgatcgtcggtatcggttatgcgattgtttactacaccatcttccgcgtgctgattaaagcactggatctgaaaacgccgggtcgtgaagacgcgactgaagatgcaaaagcgacaggtaccagcgaaatggcaccggctctggttgctgcatttggtggtaaagaaaacattactaacctcgacgcatgtattacccgtctgcgcgtcagcgttgctgatgtgtctaaagtggatcaggccggcctgaagaaactgggcgcagcgggcgtagtggttgctggttctggtgttcaggcgattttcggtactaaatccgataacctgaaaaccgagatggatgagtacatccgtaaccactaatccgtaagacgttggggagactaaggcagccagatggctgccttttttacaggtgttattcagaattgatacgtgccggtaatgctgaaattacgcggtgtgccgtagacgatagaaccttccacgttggtatcgtaggttttgtcgaacaggttattgacgttcccctgtaagctgaagtttttcgtcacctggtagcgggtgaagagatccaccagcgcgtagctaccttgctcggcgcggaaggtgccatacggcgtcacggtgtcggtatacacgcgattttgccagttaacaccaccgccgaccgtcaactctggcatgacaggcaaccgatagctggtgaacattttaaccgtggtgcgtggcagattaggattaacggcgtttccttcgttatcctctgcaatatagcgcgttgcgccaaatgtcagctgccagttgtcggtaattgcgccgttgagttcaaattccacccctttactgactgtcccatccaccgctttataggcggtttcgccgttgctgccggggataggtgtaccggtggactgagcgacattatcctgctcaatacggaagatggctaacgtggtggtcagacggctattcatccagtcgcttttcagacccagctcgtagttgttaccggtgattggagccagatatttgccactactgtcacgatcattttgcggctggaaaatagaggtatagctggcgtaggtgctccagttgtcattgatgtcaaacaccagaccagcgtaaggcgtggtgtggtttttctccatgctgtaagtcagcgtatcaacccgccagttggtataacgtgcgccgaggatcagatgcagcggatcggcaagggtgacacgagtggcagcatataagcttttcatatgtgtggtatcgtcctgcgccaggctctgtggactccagtcggtttgtgggaaattgccattaaagttgtagaaactgccaatttcatccgggaagatgttggcccaactactgaagtaacgattgttttgtttgctgtaactgccaccaaacattagattgtgctgacgaccaaacaattcataactaccgtcagcgaacaaatccagcgcatcaactttacgtttgccactgttccaaccggtgccgccgacataatcaaagccaggtccataattactgtatggcccaaccagcataccatccgctttgtttacataggcatcgacatacatcattttgctgtcaaattcgacttcagagtgggtggcattcagtgtcgcttgccaggtatcagcaaactgctgcttcagggtcataaagaccttgttgatctctttatcgttgtacgcccagtcaggtgcggtactgcgtgcgcgatcgtaactgttgctgctgccatcagtattccagcgcggtaaaccgccccaggtagggctattaacatcaatgcgctgatattcgtaaccggcactaagcgtcgtaagatcgcctaaatcagcatcgacaatgccgctgaagaaggtcttttcactgttgtagcggtccagccaactgtcgttattctggtagccgccgacaattcgcgcgcggattttaccgtcttcggtgagtgggctttgtaaatccgccacataccgttctttgttccagctaccgtattccgcgctgacatcgcctttaaattcacgactggtcgcgtgttttcgaaccatattaattgccgcagatggattacccgtcccggtcatgagtcctgtcgcgccacgcactacttctacgcgttcaaagagtgccatatcagaaagtgcgtcgcccagattccagcggctttcaaaataggtggggataccatcaaccatatagttatcgatctggaatccgcgggaataataaagagcacgatcggaatccgcctgacttttgctgatccccagcgtgttttccatcacttcgcccagcgtttgtaactgctgatcttccatccgctgctggctaacaatagtgacgctctgaggaatatcacgttgagtcatctgcattttggtacccgcagaggtagacgttacgctgtaatcattttcgccatcatctggagctgtggcactaccctcaacaatcaccgtttcttcagtggctggtgcagcaaaagcggcagaaggtaatagtgccagtgctatgcaaccggcaagtagactcggtttggtgatggcttgatattgattatccctgttaaattgtgtactaagcatttgaaatctcttggtttatgttgtcgtcaggctcatgccggaggagggtgatgagcgattatatttagtgtgcgaataattttgtttgtaaatgcaaatgagaaatatacgcattcatatttgtcatgtaaaccaaacagagaatgtcttttcagcgcattcgcaggcagaaatgggaataatggcgatatatacggcagcaaaacgattttttgcttaagaaatcgtgagttaaggttgaaagagcaggtttaactcgaccatactctatactcgcagtgtggcgcggcgtagcatggcgcaacgcatggctatttgaaaaaggaaaatgtcgtggcagaagaaactatattcagcaaaattattcgtcgtgagatcccctccgatatcgtctaccaggatgatctggtaacggcgtttcgcgatattagcccgcaagcgccaacgcatattctgatcattccgaatatcctcattccgactgtgaacgacgtcagtgctgagcatgagcaggcgctgggacgcatgatcaccgtagcggcaaaaattgctgagcaagaaggtattgccgaagatggctatcgtctgatcatgaataccaaccgccatggcggacaagaggtttaccacatccatatgcacttgttgggtggccgtccgctgggaccaatgctggcgcataaaggtctgtaacgatgagaaaaggatgctttgggctggtgtctctggtgttgttactgctggtgggctgtcgtagtcatccggaaattccggtgaatgatgagcaaagcctggtgatggagagttctttattggctgcgggcatcagtgcagaaaagcccttccttagcacgtctgatattcaacctagtgcatccagtacgctttataacgaaaggcaagaacccgttaccgttcattatcgtttttactggtatgacgccagagggctggagatgcatcctctggaaaggccacgcagcgttaccattcccgcacatagcgcggtaacgctgtacggcagcgccaattttctgggggcgcacaaagtcagactttatctatatttgtaaggggtgaatcttgatgacaaaaatgagtcgctacgccttgattaccgcgctggcgatgtttctcgccgggtgtgtggggcaacgtgaacctgcaccggtagaagaagtgaaaccagcgccggaacaaccagccgagccacaacagcctgtccccacagtgcccagcgtgccgacgatcccgcagcagccaggcccaattgagcacgaagatcaaactgcaccgcctgcgccgcatattcgccattatgactggaatggcacaatgcagccgatggtcagtaagatgcttggggctgacggggtgactgcgggtagcgtcctgctggttgatagcgttaacaaccgtactaacggtagcctgaatgccgcagaagcgaccgaaacgctgcgaaatgcgctggctaataacgggaaatttaccctggtttccgcccagcaactgagcatggcgaagcaacagttaggtttgagcccgcaggacagtttaggcacccgtagtaaagccataggcattgcccgcaatgtcggcgctcattacgtgctgtactccagcgcctctggcaacgttaacgctccgaccctacaaatgcagctgatgctggtgcagacgggcgaaattatctggagtggtaaaggtgccgttagccagcaataagtaaaattatctggtcaggtaaaggtgccgtttcgcagcaataatcccatcacgcgcgacgaattgctgagccgctttttcccgcagtatcatcccgtcacgacgtttaatagtgggcttagtggcgggagttttctcattgaacatcagggccagcgttttgttgtgcgtcagccgcacgatcctgatgcgccgcagtccgcgttcttgcgccagtatcgggctttaagtcaactacccgcatgcattgcaccgaagccgcatttatatctccgtgactggatggtagtcgactatctgcccggcgcggtaaaaacgtatttgccggataccaacgaactggcaggcttgctgtattatctacatcaacaaccacgttttggctggcgaataacgctgttgccgttactggaactgtactggcagcaaagcgatccggcgcggcggacagtgggttggctgcgaatgttaaaacgtctgcgcaaagcgcgggaaccacggcctttacgcttaagtccattgcatatggatgtccacgccggaaatttagtgcatagcgcgagtgggttaaaactcatcgactgggagtatgccggagatggtgatatcgcgctggaactggcggcggtgtgggtggaaaatactgaacagcaccggcaattggtcaatgactatgccactcgcgcgaagatttatccggcgcaattatggcgtcaggtcaggcgatggtttccctggctgctgatgctcaaagcagggtggtttgagtaccgctggcgacaaaccggcgatcaacaatttatcaggctggccgatgacacctggcggcagctattaataaaacaataaggagagcagtgtgggtccagtaatgttggatgtcgaaggttacgaactggacgcggaagagcgtgaaatactggcgcatccgctggtgggagggctgattctctttacgcgtaactatcatgatcctgcccagttacgtgaactggtgcgccagatccgcgcagctagccgcaatcgtctggtggtggcggttgatcaggaaggtggacgcgtgcagcgttttcgtgaaggttttacccgcttgccagcggcgcaaagtttcgctgcgctgagtggaatggaagagggtggcaaactggcgcaggaggcaggttggttgatggccagcgaaatgatcgctatggatattgatatcagctttgcgcctgtgctggatgtcgggcatatcagcgcggcgattggcgagcgttcttatcatgccgatccacaaaaagccctggcaattgccagccggtttattgatggtatgcatgaagccggaatgaaaacgaccgggaaacacttcccaggacacggtgcagtaacggcagacagtcacaaagaaacaccgtgcgatccacgtccacaagcggagattcgcgctaaagatatgagcgtcttcagttccttaatccgcgaaaataaactcgacgccattatgcctgcgcatgtgatctacagtgatgttgatccgcgtccggcgagcggttctccctactggctgaaaaccgttttgcgtcaggaactgggttttgacggcgtgattttctctgacgatttaagcatggaaggtgccgcgattatgggcagttatgccgaacgcgggcaggctagtctggatgcgggttgcgatatgatcctggtctgcaataatcgtaaaggggccgtcagcgtgttagataatctgagtccgatcaaggcagaacgtgttacacgtttgtatcataaaggtagttttagccgacaggaactgatggacagcgctcgctggaaagcgatcagcacccgtctgaatcagttacatgaacgctggcaggaagagaaagcaggtcactaaccctggcttatgtgaggaagcgatgattatctatttacacggttttgactctaacagtccgggtaaccacgagaaagtcttacaattgcagtttattgacccggatgtacgcttgataagctacagtacgcggcatccgaaacatgatatgcagcatctgcttaaagaagtggacaaaatgttgcaactgaacgttgacgagcgtccgctaatttgcggcgttggcttgggcggatactgggcggaacggattggttttctttgcgacatccgccaggtgatcttcaaccctaatttgttcccttatgagaacatggaaggcaagattgatcgcccggaagagtatgccgatattgccactaagtgtgtgaccaacttccgtgagaagaatcgcgatcgttgcctggtgattttgagccgtaatgatgaagcgcttaacagccagcggacatctgaagagttgcatcattattacgagattgtctgggacgaagagcagacgcacaaattcaagaatatctccccgcatttacagcgcattaaagcgttcaaaaccctcgggtaaatgccctcgtcgcatcaggtaaccttgccggtacctgatgcgctccgaattctgtgggtcggataaggcgtccacgccgcatccgacagtcgagcatcaatgcctgatgcgcttcttatcaggcctaccgaacgccctgcatacacccctcactctatatcactctcacaaattcgctcaaataataaacaataaactctgttttttgatctcacccggtaaagtcgcctatcttttcagcaacaaaacttgattaacatcaattttggtatgaccaatgcaccattcatgttattctcaatagcgaagaacattttcattgctgtaacctgttgttaattaagagctatgttaataaccattaattaacaattggttaataaatttaagggggtcacgttgactacgccattgaaaaagattgtgattgtcggcggcggtgctggtgggctggaaatggcaacacagctggggcataagctgggacgcaagaaaaaagccaaaattacgctggtcgatcgtaaccacagccacctgtggaaaccgctgctgcacgaagtggcgactggcagccttgatgaaggcgtcgatgcgttgagctatctggcccatgcgcgcaatcatggtttccagttccagctgggttccgtcattgatattgatcgtgaagcgaaaacaatcactattgcagaactgcgcgacgagaaaggtgaactgctggttccggaacgtaaaatcgcctatgacaccctggtaatggcgctgggtagcacctctaacgatttcaatacgccaggtgtcaaagagaactgcattttcctcgataacccgcaccaggcgcgtcgcttccaccaggagatgctgaatttgttcctgaaatactccgccaacctgggcgcgaatggcaaagtgaacattgcgattgtcggcggcggcgcgacgggtgtagaactctccgctgaattgcacaacgcggtcaagcaactgcacagctacggttacaaaggcctgaccaacgaagccctgaacgtaacgctggtagaagcgggagaacgtattttgcctgcgttaccgccacgtatctctgctgcggcccacaacgagctaacgaaacttggcgttcgcgtgctgacgcaaaccatggtcaccagtgctgatgaaggcggcctgcacactaaagatggcgaatatattgaggctgatctgatggtatgggcagccgggatcaaagcgccagacttcctgaaagatatcggtggtcttgaaactaaccgtatcaaccagctggtggtggaaccgacgctgcaaaccacccgcgatccagacatttacgctattggcgactgcgcgagttgcccgcgtccggaagggggctttgttccgccgcgtgctcaggctgcacaccagatggcgacttgcgcaatgaacaacattctggcgcagatgaacggtaagccgctgaaaaattatcagtataaagatcatggtagcctggtaagcctgagcaacttctccaccgtcggtagcctgatgggtaacctgacgcgcggcagtatgatgattgaaggacgaattgcgcgctttgtatatatcagcctataccgaatgcatcagattgcgctgcatggttactttaaaaccggattaatgatgctggtggggagtattaaccgcgttatccgtccgcgtttgaagttgcattaatcgacgtacactggcggatgtggcataaacgcctcatccgcccttgaggaacagcgcgatcggcagccgcgttgtatcaggcatcctttcagactcctccgaatccttaagtatttccagccattcccgcgcttttcatcttctgtctgatagctgcttttctccttcgcttgcatgattggcataactgcaaagaaggaggtgttcccgtgaataaaagtatgttggcgggtatcgggattggtgtcgcagctgcgctgggcgtagcggcagtggccagtctgaacgtgtttgaacggggcccgcaatacgctcaggttgtttctgcaaccccaatcaaggaaacggttaaaacaccgcgtcaggagtgtcgcaacgtcacagtgacccatcgtcgaccggtgcaggatgaaaatcgcattaccgggagcgtgctcggcgctgttgctggcggcgtgatagggcatcagtttggtggtggtcgcggtaaagatgtcgccactgttgtgggggcgctgggtggtggatatgccggtaaccagatccagggctctctccaggaaagcgatacttacacgactacgcaacagcgttgtaaaacggtgtatgacaagagtgaaaaaatgctcggttatgatgtgacctataagattggcgatcagcagggcaaaatccgcatggaccgcgatccgggtacgcagatcccgctagatagcaacgggcaactgattttgaataacaaagtataacaaggctgtactctgcaatttggcccctcattcgctcaggctgaggggctttttttgcgacttatttcaccagttcgggccataaacgcaaagtcgttccggcaatctgcatcagtttttccaggcttgcaccttcgcgtgcgctgatgctcatcccctgaataatacaattaaggaattctgccagatgtgtcacgtcacagtggggcgggatttccccgcgcgcttgtcgttgacataaaaactgctgcaaagtgcgctcttgcatcgcatggcgacttttcaacgtattggcgatatctccactatctggggagagggtggtgcagttgttgatcatgaagcagcctgccggggtgtctttgctggtaaagcagttggcgatggcagcaaaatagtcagccagcgcagactccacgcttttctcttcacaaaacagctgtgcttcatgcttagcggcaaaacgatcgatatagcggtcgagaacggcacgaaataacccctctttgttggtaaattccgcgtatagcgtgggcgctttggctccggtcgcttcgacgaggtccgcaagagaagtcgcttcataaccgtgttgccagaacaatttcatggccttatcaagcgcggcatccctgtcgaacacttttgggcggccacggcttttttttacacattgtgtactgtcagttgccatgatgccgttgtacctggtgactgtgaatgaaaggttattataaaaataatcacctccgttcaccagtccagatcccataaaaataattgctttctatttaactgaaatttaaagatttttaaattaattaatgattgttataaaaaatatcttgtatgtgatccagatcacatctatcatttagttatcgatcgttaagtaattgcttgcgacgtcattcatctgcataaggccactattatgaaaaacgtaaaaaccctcatcgctgcggcgattttaagctccatgagttttgccagctttgcggctgtcgaagttcagagtacgccagaaggccaacaaaaagtcggtacaatcagtgctaacgcggggacaaatctgggaagcctggaagagcagctggcgcaaaaagcggatgagatgggcgcaaaatctttccgtattacttctgtaaccggtccgaataccctccatggaacagcagtaatttataaataagcattaaccctcattaatgcctgctactgctgattttttccccgcgacatgccgtgtcgcggggatttttttatccgggctttacagcgtttgtgggctcacttgatgacggcggacatccaccggcatcccggaacggacatccatcacatgttgcatcacttcagcgtcagtttgtgctgcatctttaaaactttgcattgcgctattcagcgtaattggcagcagctgcggatcgtcatcaatcttctcactcagcggctgatgtacttcaaccagacgcgcaccgtttggttcggcagagacttttatcggagtgttgatgatattcactttggtgcctggggtgacctggctaaagagtgttttgatatcgtcatcccgcagacgaatacagccagaacttacccgcatgccaatgccgaaatcggcgttcgtaccatgaagcaaataaacgccgccataggccgccagacgaatcgcatgatggcccattgggttatccagtccagccggcactaccgcaggcaactcaattccctgtgctttataacgggcgcggatgtttgccgttggcgtccaggttgggtttgcacgtttgtcactaacggtggtcaccattgtcggtgtcagcgtgtcaccacctaactgaccaatacctattggatacacggttacgctatttttacccggcgggtagtaatagagacgcagctccgcaatgttgatcacaatgccttcgcgcggcgcatctggaagtagggtttgcaacgggatcgttaacacgctgcccgcgcgcggtacgtaaggatcaacgccggggttagcctgtaacagagcgagaaagccgacgttgtattttttggcgatggcttccagagaaccaccgtcattttccaccacatgaaatttgttttcgccaaccagacgactgcccgctggcggcagcggccaggtgttggcttttgccggtagcgccagcgccacggcagcggcgaacgtaaaaaacgttagccagcgagaaaaacgcgttttgatcatcaccaaaaatccataataaatataaggttattgtaataaacagataagcctgaattatggatggtgacagtgtcggatagtgcagggaagtgcaaagaatttgtaaatgttgcagatgggggcgcagaaacgcccccgatttaccattaagcgatcgcgttctcttccagttcacgcataaactggcgtacccattcgatacgcgttttccgctcactcaaatcctgaataaatttcaggcgcgtcggaccatcaaggcggtaatgctgcggctgtttttgcagcaaaccaatcaaccaggccggattaacgtgattcttctcggcaaattcgatcaccccgcctttctcattaccttccagcttcctgatccccagtttctgcgcttgctggcgcagacgggcaatatccagcagggtacgcgccggatctggcagcaggccgaagcgatcgataagctcgactttgatctcttccagttcgttttccgttttggcgctggcaatacgtttgtagaagctcagacgcgtgttcacgtcagggatgaaatcatctggcaataggctcggcatccgcagctcgacttctgtttgctggctggtgagatcttccaggctcggctcgcgtccggctttcagtgcatcgacggcgttttccagcaactccatatacaggctgaaaccgatggtttccatactgccgctttgttcttcgccaagcagttcacccgcgccgcgaatctccagatcgtgcgttgccagcgcaaaacctgccccgagatcttccaggctggcaattgcttcaagacgtttttgtgcatcggtagtcatcgcttttggatgcggtgtcagcaaccatgcatatgcctgatgatggctacgtccgacgcgaccgcgtaactggtgcagctgcgccagaccgaagtgatccgcgcgttcaatgataatagtgttggctgtcgggatgtcgatcccggtttcgataatggttgtacaaaccagcacgttgaaacgttgatgatggaaatcattcatcacccgttccagttcgcgctcgcgcatctgcccgtgaccgatggcgatccgcgcttctggcaccagttctgccagccgttcggcggctttctgaatgttttccacatcattgtagagataataaacctgtcctccgcgcaaaatttcacgcaggatcgcctcccggaccaccatgctgtcatactcacggacaaaggttttaactgccagacgacgggcgggcggcgtggcgataatgctcaggtcacgcattccgctcattgccatattcagcgtacgtgggatcggcgttgcagtaagcgtcagaatatccacgttcgcgcgcatcgctttaatgcgctctttatgacgcaccccgaagcggtgttcttcatcgacaatcagcaggcctaaatctttaaacttgacgtcactttgcagcagtttgtgcgtaccgatcagaatatcgattttcccttccgccacttccgcaaggatttgcgtctgctctttggcgctgcggaaacgggagatcatttcgatacgtaccggccagttggcgaaacggtcgcggaagttgtcgtaatgctgctgcgcgagaagggtggtaggcaccagcaccgccacctgcttgtggttatctactgccaggaaagctgcgcgcatcgccacttctgttttaccaaagccaacatcgccgcacaccagacgatccattgccagcggctgacacatgtcgctaagtaccgcattaatggcctgcgcctgatccggcgtggtttcaaacgggaagctgtcgcagaacaactgatactgctcacgatcgtgtttaaacgcgaagccctctttggcggcgcgttgcgcgtagatatccagcaattccgccgccacatcacgcactttttccgccgctttctgccgcgcgcgactccacgcatcgccgccaagtttatgcagcggggcgttttcttccgcgccacctgcgtaacggctaatcagatgcagactgctcaccggaacatacagtttggcgtcgttggcataggtgagcatcagatactcgccagtaatgccacccgcttccagcgtggtcattccggcataacgaccgacgccgtgctccagatggaccaccggctgaccaatatgcagttccgcaaggttacggatcagtgtatcggggttgatggtgcggcgagaatcctgacgacgacgggcaacgcgttcaccgagcagatcgctttcgcaaatcagcgccagattacgcaccgtatcgacaaaaccatgttcggcagcgccaatcatcagataacgcccacggtcgctggcttcatcaagacgcataatgcgttgcggagcaattttaattcgtgcgagcagttcacccagcgcttcacggcgaccttcactttctacgctgaacaccaccggaccgtcgaaagtctcgaggaacttacgcagcgcatccagcggcgctttttgttgtgcctgaacggccaggtctggcagtttctggaaacctaaattggcattcgcggcttttgtcggtaaatgttcagtttttagctgcacccggggccagtttttcagctcactgaagagctcgtccacccgcagccagaggctttgtggtggcaacagcgggcgcatcggatcgacgccgcgattctcaaaacgcgccagcgtgtcagcctggaaacgttcggcactggtttccagatcgccagtattcacgagcaaggtattggcagggaaataactgaacagcggcggcagtggttcgctgaagaacaatggctgccagtactcgatcccggcaggtaatgtgcctttactcacttgctggtaaatatgttctggatcgcgcttcacttcgaaggtatcgcgccactggctgcggaacagttcaattgccgctttatcggtcggaaattcgtgcgcgggcagcagattgatcgcttctacttcctccagcgtgcgctggctgtcgacgtcaaacacccgcaggctgtcgatttcatcatcaaagaaatcaagacgataaggcagctcactccccatcgggaagagatccagcaacgcgccgcgcgtggcgtattcgccgtgctccatcacctggtcaacatggcgataaccggcgctgtccagttgggttcgtaatgcatctcgactcaggcgctgaccttttttcatcaccagcgcatgaccgtggagaaaactgtgtgggcaaacgcgctgcataagcgtattcaccggaacaatcagtacgccacgctgcatcgtcggtagctggtaaagggtggaaaggcggctggagataatgtcctgatgagggctaaaactgtcgtagggaagagtttcccagtccgccagattcatcaccatttgatcggtaaactggctgatttcatcatgcaaacgcagagcattttgcatatctggtgcaatgagtaccaccggaccggcgtgacgttcggcaatttccgctaccagcgttgcacaggctgcgccggttaactcgcccagcagacgctgctcacccgctttgacgggcagcgtataacgatattgttcaggcataacggttgtcagattctcgttaggatatgcctcaacatatgggggcatatctctgataagcaatgctgttcattatccgtaatcgacatggtttagcaaattgaatcgccccggctggggcgatggcttagcgggagtaactgacggcagcgggcagactaggcggggagaacaacagatcgctgaatgcacgctgactaagttttcttaccagcaagcccgcaacagtacagatgaacaaactgacaaagggataaaccagcaggagtgtcagttcgacttgcgggctccagcgtgctgcgttcatttgcgcaagcagagttaagctgaatatttcaaccagaatgcgatgggtggtgtagatagcaatggtgttggagccaatcacattcagcaggctggtggagcgcataccgaatcgttgctcgtattgataaaacagcttcatgatcaccacaatgcttaccaggctcaacagcaggctgatagtaaacaaccaggcaccgaccgccagaacggtaagcaaagaagccatcagcagatggcggcgcaacggcacctctttaacacaggtcattattgttgcgccaaaccatgcgccaaggctgtaataaggcaaattgcggatcacactgttcattccccaccacggcgtgggaacgaaattaaccgccacactcagcagtacaaacaaggcgaatagtggcagcgccagacggctaaaaattttacataccacgaaatagacaattaacgcatacagataccacaagctggtgctggcggtgatcatcccgtgcaggaactcaccggtggaatcggcataagcggcattggaggcattgcttaaatcgcgctcaggtgccagccactggttcagcgcacttaacgccagccactgcaccacgccccaaagcgccagcacccagaagatgttccagatccgtttatcgagacaatttccccacggtacgctgtcgatatagcggcgaatcaaatagccggatataaagaaaaaaaccggcatacgaaagggggcaaggtaaagattgaaatagatccagcatttgctcaggacttcgcttaacggatgctgaaaagtggtcagatgcggataaaaggtaatgacgctgtgataaatcaccaccagacaaatacataaccctttgatctggttaatccatagctctttttgtttcatcaggacaacacgctcttttttaatttacatgcggttgatcctgcgggttatgacccgaggtgtaatgggtatctgtctgtattggatgatttttcagattaagatcaggcggcaagattgatgataaaacatggcaatttagccgattgatttacgggggcttttcagattagccctgacgatcacttacagttcagacgtttacccatcttgctttcgcttatatactcgtgtctttgctacagcaaccagacggatttcatgtaccaacctgtcgctctatttattggcctgcgttacatgcgtgggcgtgcagcggatcgcttcggtcgtttcgtctcctggctttctaccatcggcattaccctcggggtgatggcgctggtcacagtattgagtgtgatgaacggctttgagcgcgagctgcaaaacaacatccttggcctgatgccacaggcaattctctcttctgagcatggctctcttaacccgcagcaactcccagaaacggcagtcaaactggacggcgttaatcgcgtcgcacctattactaccggtgatgtggtactgcaaagcgcgcgcagcgtggcggtcggggtgatgctcggtatcgacccggcgcaaaaagatccacttacaccgtatctggtcaatgtgaaacaaactgacctcgagccggggaaatataatgtcatcctcggcgaacaacttgccagtcagctaggcgttaatcgcggtgatcaaatccgcgtgatggtaccatctgccagccagttcacgccgatggggcgtattccaagccagcgcctgttcaatgtgattggcactttcgccgccaacagtgaagtcgatggctatgaaatgctggtgaatattgaggatgccagccgtctgatgcgttatccggcaggcaatattaccggctggcgtttgtggctggatgagccgctgaaagtcgacagtttaagtcagcaaaaactgcctgaaggcagcaaatggcaggactggcgtgatcgtaaaggcgagttgttccaggccgtacgcatggaaaaaaatatgatgggtttactgctgagcctgattgtcgccgttgcggcgtttaacattattaccagtctagggctgatggtaatggagaagcagggcgaagtagcgatcctgcaaacgcaaggcttaactccgcgacaaatcatgatggtctttatggtgcaaggggccagcgccgggattatcggtgcgatcctcggagcggcgcttggcgccctgcttgccagccagttaaataatctgatgccgataatcggcgtcctgcttgatggcgcggcgctgccggtggctatcgaacctttacaggtcattgttattgcgctggtggcgatggctatcgcgctgctgtctacgctttaccctagttggcgcgctgccgccactcaacccgctgaggctttacgttatgaataagatcctgttgcaatgcgacaacctgtgcaaacgctatcaggaaggcagtgtgcaaaccgatgtgctgcacaatgtcagtttcagcgtcggcgaaggtgaaatgatggcgatcgtcggtagctctggttccggtaaaagtaccttgctgcacctgctgggcgggctggatacgccaacctccggcgatgtgatttttaatggtcagccaatgagcaaactgagcagcgcagcgaaagctgaactgcgcaaccagaagctgggctttatttatcagtttcaccacctgctgccggattttaccgccctggaaaacgtggctatgccgctgctgattggcaagaaaaagcccgctgaaatcaacagccgtgcacttgagatgttaaaagcggtggggctggatcatcgtgcgaatcaccgcccatctgaactttctggcggcgaacgccagcgtgtggcgattgcccgtgcgctggtgaataacccgcgcctggtactggcggatgaacctaccggtaacctcgatgcgcgtaacgccgacagcatcttccagttgcttggggaattgaatcgcttgcagggcaccgccttcctggtggttactcacgacctgcaactggcgaaacgtatgagccgccagttagaaatgcgtgatggtcgtctgacggcggaactgagcctgatgggggcggagtaatggcgatgcctttaagcttattaattggcctgcgttttagtcgcggacggcggcgcggcggcatggtgagcctgatctccgttatttctaccattggcattgccctcggcgtggcggtattgatcgtcggcttaagcgcgatgaacggctttgaacgcgaactgaacaaccgtattctggcggtggtgccgcatggtgaaatcgaggcggtggatcagccgtggactaactggcaggaagcactggatcacgtgcaaaaagtgccgggtattgccgctgccgcgccgtatatcaatttcaccgggctggtggaaagtggcgcgaatcttcgcgcaatccaggtgaagggcgttaacccgcaacaggaacagcgtctgagcgcattacccagctttgtccagggcgatgcgtggcgcaattttaaagcgggcgaacagcaaattatcatcggcaaaggcgtggcggatgcgctgaaagtgaagcagggggattgggtgagcattatgatccccaacagcaatcccgagcataaactgatgcagccaaaacgtgtgcgtttgcacgttgccggtattttgcagttgagtggtcaactcgatcacagttttgccatgatcccgctggcggatgcccaacaatatcttgatatgggttccagcgtgagtggtattgcccttaaaatgacggatgttttcaacgccaataagctggtacgcgatgcgggtgaagtgaccaacagctatgtttatattaaaagctggattggtacttacggctatatgtatcgcgatatccaaatgatccgcgccattatgtatctggcgatggtactggtgattggcgtggcctgtttcaacatcgtctccaccttagtgatggcggtgaaagacaagagtggcgatatcgcagtattaagaacgctgggggcgaaagatggtttaattcgcgccatctttgtctggtatggattgctggcagggctgttcggcagcctgtgtggtgtgattatcggcgtagtggttagtctgcaacttaccccgattattgagtggattgaaaagttgatcggtcatcagttcctctccagcgatatctattttattgatttcctgccaagcgaattgcactggctggacgtcttctacgtactggtcacagcattgttgctgagtcttttggcaagttggtatccggcgcggcgcgccagtaatattgaccctgcgcgagtccttagcggccagtaaaggcagtacattaaaacaaggagcggcaatgtattacgggtttgatattggtggaacaaaaattgcgcttggcgtgtttgatagcggtcggcagttgcagtgggaaaagcgggtgccgacaccgcgtgacagctatgacgcatttttagatgcagtgtgtgagctggtagctgaagctgaccaacgttttggctgtaaaggttctgtcggcatcggtattccgggaatgccggaaacagaagatggtacgctgtatgccgccaatgtccccgctgccagcggtaaaccgctgcgtgccgacctgagcgcacgtcttgatcgcgatgtacgccttgataacgatgccaactgttttgcccttagtgaagcctgggatgatgaatttactcaatatccactggtgatggggttgattctcggcaccggtgttggcggcgggctgattttcaacggcaaaccgattaccggtaaaagctacattaccggcgagtttggccatatgcgtctgccggttgatgcgttaaccatgatggggttggatttcccgttacgccgctgcggctgtggtcagcatggctgcattgaaaattatctgtctggtcgcggttttgcgtggctgtatcaacactattatcatcaaccgttgcaggctcccgaaattattgcgctttatgatcaaggcgatgagcaggcaagggcgcacgttgagcgttatctggatttattagcggtttgtctgggaaatatcctgaccatcgttgaccctgacctggtcgtcattggtggtggcttaagcaatttcccggcaatcacaacgcaactggcggacaggctgcctcgtcatctcttacctgtagctcgtgttccgcgcattgaacgcgcgcgccacggtgatgcgggaggaatgcgtggtgcggccttcctacatctaaccgattaaacaacagaggttgctatgctgagccgtcggggtcatcggttaagtcgttttcgtaaaaataaacgccgcctgcgcgagcgtttgcgtcagcgtatttttttcagagataaagtggtgccggaagcaatggaaaaaccaagagtactcgtactgacaggggcaggaatttctgcggaaagtggtattcgtacctttcgcgccgcagatggcctgtgggaagaacatcgggttgaagatgtggcaacgccggaaggtttcgatcgcgatcctgaactggtgcaagcgttttataacgcccgtcgtcgacagctgcagcagccagaaattcagcctaacgccgcgcatcttgcgctggctaaactgcaagacgccctcggcgatcgctttttgctggtgacgcagaatatcgacaacctgcatgaacgcgcaggtaataccaatgtgattcatatgcatggggaactgctgaaagtgcgttgtagtcaaagtggtcaggttctcgactggacaggagacgttaccccagaagataaatgccattgttgccagtttccggcacccttgcgcccgcacgtagtgtggtttggcgaaatgccactcggcatggatgaaatttatatggcgttgagcatggccgatattttcattgccattggcacatccgggcatgtttatccggcggctgggtttgttcacgaagcgaaactgcatggcgcgcacaccgtggaactgaatcttgaaccgagtcaggttggtaatgaatttgccgagaaatattacggcccggcaagccaggtggcgcctgagtttgttgaaaagttgctgaagggattaaaagcgggaagcattgcctgatgcactacgcttatcaggcctgcaaggggacgcaattaattgaatttgcgggttttgtgggccggataaggcgttcgcgccccatccggaataatacacgcgcacttttccggcctcttttatcgtttactcgtcaataacaatgcggcaataaacgtacagacaccaattagccctgcccagagtgggcttattctggtaatcgcaaagctattatcgatatacaaacataaagcctgataacccatattggcaatagtcatcgccactgcaaattttaacgcataaataaaacgagtcgtgtagtaaaagatcctggaaaataagataaacgtcgcagcccaggcgataaaacctaatgtgttggtgctgccggggggagcattttcatgctgttgtcctggatgcggataatacgttagtggcggcgtgctttgttttaatatctgtgcttgtagaacagccaatgcattattgattccctgataccagagatctgcatttaaataagccagcgtgtgattttctatcagaaggccgagatgtttatcgtccagaccactttcaacctggccgttggtgatcataattaaccgtggttcgcgggtagtaaatagtaacagaacacttccttttacatcactcaaactagaactcgcatgcgccagcatcgctttaccattttgtctgagactggcttcattattaatgtcgggtaaaaccacaataaacggtgcaattcccgtttgttggcgaaaaagctcggctttatgcgcgatctcttcagcatctggtacagtaccggtaacgtccgtaaaaagtgtcttcattattggaattaatggcttgctggctgctgtcagaggcaggagtatcagtaaactgagcagtataatgaattttttcatgggcgggacttccgtttcctgcgactttttttagaggagggcatacttattaataaaccgacggcgataaaaataacgcccataatgccgataaacccccatttaaaaaaattaacccacgggttatttatctcagccttttcaggatgcccgggagaataataaacattaactttatcgccttcgctgtcttcataaaaatcgctgccgatactgctattgaaaattagcgtgtaatctggcgtcggtcgaaaggcaacgacgggataccagctaccatctttacccgtgcgatgagaatgactggagtgccagacggtatcaacaatgacgccttcggtatgaatcgcgtctttgctataggtgaactggttataaaagacaacaacagaaatgaggatcagtaccagaccgataccgaggaatatacgaaagaaaactttactgtcctgactcattagccacatccttgctaactaaaaaacgggcggtaataccaccgcccgcttgctgaattaacgtcctgctttcagcttctgataatactcttcataaatgctgctggctgcgccaacgtcattctgccattcgccatttttaatggtttcagcatccgggtagagtgttttatcgttcgccacttctggacttaacagcttacgcgccgcaaggtttggcgttggataaccgatagtttcagcaacctgttttgccacatccgggcgcagcaggaagttgatcaatttcagcgcgccttctttgtttttggcatttgccgggatcgccaggctgtccatccagaaaatgccgccttctttcggccacaccacgtcaattggcgtacccgcctggcgtgcaacgaaagcagaaccgttccagatcatgccgaggttaacttcgccttccatgtacgggttcgccgggttatcggagttaaaggctgccacgtttggcatcagttttttcagctcgttatatgcagcttcaatctctttcggatcggtggtgttaccggagtagcccagcttacgcagcgccatctggaacacttcacgggcatcgtcggtcaacagcaggctgcctttgtactctggcttccacagatcggcccagctggtgacagatttcggatccaccgcatcaccgttaacaccaatcgccgtcgcaccccagatatacggaatggagtagtcgttattcgggtcaaaaggcttgttgagcatgtctggatcgagattgctgaagtttgttaacttgctcttgtcgatcttctggatcatcccttctttacgcattttatcaacgtaataggtactaggaaccaccagatcataggcaccgtctttgtatgttttcagcttggcgtacatggtttcgttgctctcgtaagtgctatagataaccttaataccggtttctttggtgaactgttcaagcagtcctggcggcacgtactcggtccagttgtagaaatacagcgtgttgttgtcatcggcgtgagcggcgctcatgcccagtgccagagcacccgccgcgagcaggtggcgactccattttttcatttaacgtcccctgtgttacctttcgttttatcacgagcaataagctggctggcaataaccatcaccaggctcagcaccagtaatatggttgccagcgcgttaacttccgggcttacgccgactttgaccatgctataaatttttaacggcagaatttcataacttggtccggtgacgaagctagaaactaccacatcgtccatgctcagggtaaagcttaacacccagcccgccgccaccgctggcattgccagtggcagaatgatttttcgcagaatggtaaattcgctggcaccgagatctttcgccgcttccagcattcgcacgtcaaaacctttcaggcggctatacaccgtcaccaccacaaatggcaggcagaaggtgatatggctgaacagcaggctccagaagccaagctgaatacccagcagcataaacagcaccagcaggctaatcgccatcacgatatctggactcatcatcaccacaaacagcattccgctaacgaacggcttaccacgaaagcgataacggtacagcgcaactgccgtcagactaccgataagcgtagcaaacgtcgcgctaaacaccgccattgttagactatgctgcgctgcctgtaacaggctgtcgttgttcatcagcaggctataccatttggtggtaaagccctgccagttgatgccaaagcggctgctgttaaaggagttcacaatcaaaataatgattgggatatacaggtacgcgtagatagcggtcataaaaccgccgcgaagcagtcgaccgatcattcgagttccaccttcttattcagcaaacgagaagcgcgccagtaaaccagcaacatcaggcccattacgatagtcagcgtaatgctggtagctgcaccaaacggccagtcacgaatattaaggaactggaccttgatgacgttaccgatcagcaggtttttcgcaccgcccatcaggtcggatacatagaacaggcccatcgctggcagcatcaccagcagacatccggcaataattcccggcatcgtcagtggaataatgatacggataaaagtctgtaacttgctggcaccgagatcgcgcgccgcctcaagcaacggcttatccagtttttcgatactggagtacagcggcatcaccataaacggcagcagaatgtaaaccagaccgataatcaccgcactgggcgtgaacatgatacggattggtgtgtcgataacgcccagccagagcaaaaactcgttgagatagcctttggtgctgaggaaaattttcagcccgtagatacgaattaaactgttggtccagaacggaacaatcagcagaaacagcagcagcggacgcaccttgtgtggcaacttcgccagaaaccaggcaaacgggtagcccagcaccaggcaggcgagggtggcgatcagcgccatattcaggctgtgcaatagcacttcaaaatagagcggatcgagcagacgcgtgtagttatccagcgtaaagaccattttgacaaaactggcgtcgtcgcgggtcaaaaagctggtgccaatgatcatcaggttgggcagaaagacaaacaacacaagccaaccgacaatagtgacaatcactacattctggaacttacttgtgttcttcatcagccagtacgacctcccagctttctacccaattaatggccattttttggtcgagagagtggtcaaagtcaggatcgtcttcattgaagaattcgctgaccatcaccatcttgccattttccagttcaacaacgctctccagcgtcatgcctttgtagttacgctcgcgaacgtaaccaatcagcccttcagcgtggttgtcgtcgttaatctcttcaacacgtaagtcttccgggcgcagcagaacatgcagtttttgccccggttcaacggcgaagttaacgtagatattacattcgcggccttcaacgttggcgcgtacgcgctgctcgtctagacgttcgatgacagtggcgttaaacatattgatttcgccaatgaagccggcaacaaacaggtttttcggctcttcgtagatttcacgcggcgtgccgtcttgctcaatgcgaccatcgcgcatcaccacaatcctgtcactcatggtgagtgcttcttcctggtcgtgagtcacaaagacgaatgtaatgccaagcttacgctgtaacgctttcagctcgttctgcatttgcttacgcagtttgtaatccagcgcactgaggctctcatccagcaacaacagacgaggcttgttaaccaccgcgcgagcaatggcgacgcgttgctgttgaccaccagagagctgatgcggtttgcgttgagcgaaggtttccaactgcaccatccgcagggcttccatcacgcggggcgtaatttcagcagcgggggttttttgcatgcgcaacccaaaggccacattttcgaacacggtcatgtgggggaaaagtgcgtagctttggaaaacagtgttcacatagcggttttccgccggaacgtgggtgatgtcctcgttatccagcatgatgcgtccggaatcaacagtttccagacctgcaatcaggcgaagaacggttgttttaccgcagccagaagggccaagcagcgtgaggaactcgccattgttgatagtcagatccagctggggaatgacctctttaccatcaaagcatttgcgaattcccgccaattgcaccagcggactaaggctactcggttgtttattcaattttttactctgtcccatgtaaacgcaacggatggcttaccgatgcggggtttgtggttaaccaccttggtgactcttaatgagggcggtaattctacggcaaaccgcttgaatcgccaatctttgttgtgaattactggcttagctttatattcattaaggtaatgctgataaatattcccgcttgcaggggtaaaagtgacctgacgcaatatttgtcttttcttgcttcttaataatgttgtcacaaaaagtgagggtgactacatggataaactacttgagcgatttttgaactacgtgtctctggatacccaaagtaaagcaggggtgagacaggttcccagcacggaaggccaatggaagttattgcatctgctgaaagagcagctcgaagagatggggcttatcaatgtgaccttaagtgagaagggcactttgatggcgacgttaccggctaacgtccctggcgatatcccggcgattggctttatttctcatgtggataccagtccggattgcagcggcaaaaatgtgaatccgcaaattgttgaaaactatcgcggtggcgatattgcgctgggtatcggcgatgaagttttaagtccggttatgttcccggtgctgcatcagctactgggtcagacgctgattaccaccgatggtaaaaccttgttaggtgccgatgacaaagcaggtattgcagaaatcatgaccgcgctggcggtattgcaacagaaaaaaattccgcatggtgatattcgcgtcgcctttaccccggatgaagaagtgggcaaaggggcgaaacattttgatgttgacgccttcgatgcccgctgggcttacactgttgatggtggtggcgtaggcgaactggagtttgaaaacttcaacgccgcgagcgtcaatatcaaaattgtcggtaacaatgttcatccgggcacggcgaaaggagtgatggtaaatgcgctgagcctggcggcacgtattcatgcggaagttccggcggatgaaagcccggaaatgacagaaggctatgaaggtttctatcatctggcgagcatgaaaggcaccgttgaacgggccgatatgcactacatcatccgtgatttcgaccgtaaacagtttgaagcgcgtaaacgtaaaatgatggagatcgccaaaaaagtgggcaaagggttacatcctgattgctacattgaactggtgattgaagacagttactacaatatgcgcgagaaagtggttgagcatccgcatattctcgatatcgcccagcaggcgatgcgcgattgcgatattgaaccggaactgaaaccgatccgcggtggtaccgacggcgcgcagttgagctttatgggattaccgtgcccgaacctgttcactggcggttacaactatcatggtaagcatgagtttgtgactctggaaggtatggaaaaagcggtgcaggtgatcgtccgtattgccgagttaacggcgcaacggaagtaagcgaaaagggatgcggcatgtgatgccgcatccggcttaaatccaaacttacccttcgaagaaccaatacccgctattgaccagcgccgcgagcatcgcgaggaaactcggatcttccagcgcatcgccaaaattctccgcagtcagcgcaatgttgctggcgagtgcatccagtgccggacggtgcggggaatcgatcttctcaccattggcatacacgtcgtcgccaatgcgcaatacgcgcagaccacccaggcgcaccagcacttcaccttgtttcagcgcatcgtagatttcatccggctgataaggcggctctggcggcgcgatatccagttcatgacgactctgggatataaactcgccaaaccattgcttaaagtgttccggctggttgatcaattcgagcatcatctcacgcagtttatccatctcttgcggcagaacatccgcaggatgagcgcgaggtggaacatccggatcgctgtagtagttgccgcccagttcacgttgcagcacataatcggcaaatccactaatcagttcccgcgtatttggcgcgcgaaagcccacggaatagttcatcgcattttccagcgcgtagccttcatgcgggaatcctggcggaatataaagaatatcaccaggctccagctcttcatcgatgatggcttcgaacggatcgacctgtaacagatccggatgtgggcagtgctgtttcatttgcagcttttcgcccactcgccagcgacgacgtccggtaccctgaatgataaacacgtcgtactgatcgagatgcgggccgacgccgccgccgggtacagaaaaagaaatcatcagatcatcaatacgccagtccggtagttcacggaacggtcgcatcagcgcggcggtcggctcatgccagtggttcactgcctgtaccagtaaactccagttggtttcaccgagatgatcgtagctttcgaacgggccgtggctgacctgccatttgccatcctggtgactgaccagtcgactgtcaacttcgctttccatcgccagacccgccaactcgtctggagagatcgggtcaataaaattattaaagccgcgttttaacaccaccgggcgtttctgccagtgacgttcaagaaaatcgggccagttaagagtgagttggtattccatgttaagcatccacaggctggtatctgcaaccgattataacggatgcttaacgtaatgcgtgaagtatgggcatatttattcatctttcggcgcagaatgctggcgaccaaaaatcacctccatccgcgcaccgcccagcatgctctctccggcgacgattttaccctcatattgctcggtgatttcgcgggctaccgccagccctacaccttgcccagggcgtaaagtatcaacccgttgaccacggtcgaaaatgacctctcgcttgcttaatggaataccggggccatcatcctcgaccacaatatagagatgctcgtcggtttgccttgcagaaatttcgacaaactcgaggcaatatttacaggcattatccagcacgttgcccatcacctcgacaaaatcgttctgctcaccgacaaagctgatctctgggctaatatcgagagagatattgacccctttgcgttgatacactttgttcagcgcactggtgagattgtccagcagtggggcgaccggatgcagctcgcggctgagcaatgtcccgccgcgcatactggcacgatgcaggtagtagccaatttgctgactaatgcggctgatttgctccagcattaccggctcagcatcactgacgctcatcttttcactacgcagagaacgcagcgtactttgcagcaccgccagtggcgttttcagactatgggtcaggtcggtgagcgtcgtacggtatttgtcgtaacgttcgcgttcactttttaacaatcggttcaggtttcgtaccagactggtcagttctcgcgttgtggctggattgagcaattcgcggttatgttcttccagttcgcggacttcttttgccagggcttcgatggggcgtaaactccaccaggcggcgacccacagcagcgggatcactaacagcagattggcactgagcacatagataaaccagctccagaccatataggaactttttagctccaccggaatggtatccaccaccacaatggttaattttggcatccggcttgttgccgggtagacgtttactgccacgctgtgggtcatctccgcgtcgtcatcatcttcccgcacttcctgcaactgttgctgtatgctatgatctccactcagcaagaggctggtatcgttaacatccgcttcaatttcatgaaaaccattgcttttcagccagtcaggctggatcatcttcatcagccagggcacgtcacgttgcgcccataaaagctgcccgttctcatcataaattagcgtcatggtggggctttgcttgtcgatattttcgggtaactcgacatgcaacttattgttttcccacttcgcaagggtatagaacagattgctctcgccacgtaacagccgaaacgtagttttatcgaaactgacgctataaccgatcagcgcgaccattccgtaggcaaggctaagcaccagtactaccgctgccgttgccaacagaaaacgtacccgcaggctgagcgggaaaaaaagacgcagtaattttttcatcagcgcaattcgaacagatagccctggccgcgaacggtggtaatcacttcttggggatattgtgcctgaatttttttgcgcagacgtcccatcagtacatcaatggtatggctttcccgcagctccgcatccggatagagttggagcattaagctatctttgctgaccactttgccattattgcgtatcaacgtttccataatagtgtattcgaacgcggtcagtttgatcacttcgtcattaatagataattcacggcgagagagatcaacctgaaacggggggaggctaatgacctgactagccagaccgctattacgccgcattaatgcctgcattcgcgccatcacctcttcaatatgaaacggtttagtcacataatcatcagcaccggcacttaatacttcgactttgtcctgccagctttcacgggcggttaataccagaatcggcagactaacatcgttgctacgccagcggcgaatcagactcagaccgtcctcgtctggcaatccgagatcgacaatcgcaatatccggtatatgttcattgagataataatcggcttctttggcatcttctgcgtcatcgacctgatgaccagcatcctgaatctgaactttaaggtggtgacgtaacaacgcattgtcttcaacaaccagtacgcgcatttttatttctccctgtcttaattattaaaatagtgtaacgcgattatgtggttatgggggtaaacattaaataaaccagcggggaggggaggtaaagtgaaaaaataaaaagcggataatcttaataagcaggccggacagcatcgccatccggcactgatacgaggtttatttcagctcatcaaccatcgtgatagctcgaccaatatagttagccggcgtcatcgctttcaggcgggctttctcttcttctggcaacgccagaccatcgataaactgcttcatgccttcggcgtcaacgcgcttaccgcgagtcagctctttcagcttctcgtacggtttttcgatgccatagcgacgcataactgtctggattggttcagccagcacttcccagttgtgatccagttcatccagcagatggtcacggttcacttccagtttgctcacgcctttcagggtggattgatatgcaatcaaggcataaccgatacccacgccgaggttacgcagcacggtagagtcggtcaggtcacgctgccagcgggaaaccggcagtttgcttgccagatgctgcaataccgcgttggaaaggcccagattcccttcggagttttcgaagtcgatcgggttaactttatgcggcatggtggaagaaccaatctcaccagcaatggttttctgtttgaagtggttaagggcgatataaccccagacgtcacggtcaaagtcgatcagaatagtgttgaagcgcgcaacgcaatcaaacagttcggcaatgtagtcgtgcggttcgatctgggtggtgtacgggttccactgaatacccaggctggtgacgaactcttcgctgaactgatgccagtcaacttccgggtaagcggcgatgtgggcgttatagttaccgaccgcgccgttgattttgccgaggatctccacctggttaagctggcggtactggcgctccatacggtaggcgacgtttgccatctctttaccgatggtactcggcgtggctggctgaccgtgggtacgagacagcagcgggatatcgcgatactgaacggcgagatctttaatgccatcaatcagttgacgccagtatggcaggatcacttcatcacgcgcggttttcagcattaatgcgtgggagaggttattgatatcttcgctagtacaggcaaagtggatgaattcagaaaccgcgtgcagttccgggatctccgccactttttctttcaggaaatactcaaccgctttaacgtcgtggttagtggtacgctcgatagttttgatgcgcgccgcatcttcttcgctgaaactggcgacgattgcatcaaggtaaccgattgcgtcggcagcaaaagcaggaacttccttgatcgctgcgtgcgcggccagtttttgcagccaacgtacttcaacttgtacacggaatttcagcaaaccatattcgctgaaaatcccgcgcagcgcgctgactttatcgccgtagcgtccatcgacaggggaaacggcggtcagactggataattccatagatcacaactccggggttaaatgagcaagaatttgttttgcctgagtggtcaggcgattacgagaaaacatcagttgcagacgtccgccgccgacctggtgccagagcacggcggcgcgaatgcctgccagcagggttgcgcgaactttcgcctgcacttgtgggctttgcagtacagcaggggaaccggtgacctgaatgcgcgggccaagcgggctaatcacatcaacatagatagcagccatcgcgctcatcagcgtttcggactgtaaatcgaagtgttcgagctggcgttgcaggccgttgatccggttgcccagagtgtcgagcgcgcctttcgcactggagagtttgcgctcaagcaccatcaagctgagtgtgtagcgggttaattcggcgtttaagccctggcgactgctggcattgagcacgccgagcagggtttccagcccgacgcgcaggttggcttcgctaccgccaaaaaccgccagcgtgctgctggggttcatatcaataatactgttgagactgacgtgtagcgcatcggcatcacaatgcccctggtgagcgagttgttgcaccaggcgtgcgctctgacaaataccggccagggcgagggtgatgtcatagtaattctttgccacgttcactgcttccttgttttaagtaaagataataatcagaccggcagcggcagacgctgctcaataataccgccaccgaggcacacttcaccgttatagaagacggcagactggcccggcgtcacggcggcaaccggttcatcgaaaatcacttcaatgcgatcatcgtccagcgccttgacggtgcaagggatatcggtctggcgatagcgggtttttaccgtgcaacgcatagtgccggtgaatggttcgcgatcgacccagtgcaactgctgggcaatcaacccgacagacatcagccgcgggtgttcatggccctgagcgacaaccagaatgttgttttcgacgtctttgtccaccacataccacggttcttcggtaccttctttggtgccaccgatacccagacctttacgctgaccgagagtgtgatacatcagcccctggtgctcaccaatttcatcgccatcgacggtaatgattttgcccggttgcgccgggagataacggcccaggaactcgcggaatttacgttcgccaatgaagcaaatgccggtagagtcttttttcttcgcggtgaccagaccaagatcttcagcaatcttacgcacctgcggtttttccagttcgccgaccgggaacaggctttgcgcaatctgctcatggctgagcgtataaaggaagtagctctggtctttattgctgtccagaccacgcagcaggcggctcttgccatcgacatcggcccgacgtacgtaatgaccggtagcgatataatcggcacctaaatcttcggcggcaaattcgaggaaggctttaaatttgatctctttgttgcacagaatatccggattcggcgtgcgaccggctttatattcggcaaggaacagttcgaagacgttgtcccagtactcggcagcaaagttaacggtgtgcagttcaatgccgagcttgtcgcagacagcctgggcatcagccagatccgctgccgctgtgcaatattcctcaccgtcgtcttcttcccagttcttcataaacaggccttcgacctgatatccctgttgttgcaacagccaggcagaaacggaggaatcgacaccgccggacatgccgacgattactttttttgcggtttcagacattggatcactcacgacattgaacttcaaggcggcgtattctatcacgcagccttttagatgacaccctttgtaaaaggccagttaaaatcgccaatcatctccagcggataacgttgcccgctttgataacaacgaatactttccgccaccagcgggctacgaagattactcgcctgtaaaatttcttcggcgctgacccaacggcagcagtcgatatcgctgtcatgaggctgggtcgggcatatttgctcaagctcaatggcaaagaggaaacgcaaaaacggcgttttatctggcgcaatccactgatgcatacgaataaagtgttgcggctgcgcgctgatgccggtttcttcccacagttcacgggcggcggcttccactaaggtttcatcggcttccagatgcccggcaggttggttccataacgctttaccattaatcgtctcttcaacgactaaaaatttgccttctgcgtgcaccacgcaagcaacggtaacgtgcggtttaaacattttgcatccttaatctgtcacttctcgccattcaccattggcaagattatccaaagagtaatcacccatcgcatagcgaatcagtcgcagcgtggggaagccaacatgggcggtcatgcggcgcacctggcgattacgtccttcatataaggtgatcttcagccagctggtgggaatacttttgcgttcacgaattggtggattccgcggccataaccacgcgggttcgtcaaccagctccgcgccggcgggcagggtagggccatcatttaaggttacgccattgcgcaaggcttcaagtgcgtcttgtgtgggaataccttccacctgcacataatagatttttccggtgcgtttacccggctgggttaaacgcgcctgcaacgcgccgttattggtcagcaccagcaacccttcgctatcgcggtcaaggcgacctgctgcataaacaccctgaaccgggatgaattcttttaatgttttgcgtccggcttcatcggtgaactgcggaagaacatcgtagggtttattgaacaggatcacacgcgtgggctggttttcaggtttacgcctggtagaacgttggctgctgaatcgcttaacctggtgatttctaaaagaagttttttgcatggtattttcagagattatgaattgccgcattatagcctaataacgcgcatctttcatgacggcaaacaatagggtagtattgacaagccaattacaaatcattaacaaaaaattgctctaaagcatccgtatcgcaggacgcaaacgcatatgcaacgtggtggcagacgagcaaaccagtagcgctcgaaggagaggtgaatggaaagtaaagtagttgttccggcacaaggcaagaagatcaccctgcaaaacggcaaactcaacgttcctgaaaatccgattatcccttacattgaaggtgatggaatcggtgtagatgtaaccccagccatgctgaaagtggtcgacgctgcagtcgagaaagcctataaaggcgagcgtaaaatctcctggatggaaatttacaccggtgaaaaatccacacaggtttatggtcaggacgtctggctgcctgctgaaactcttgatctgattcgtgaatatcgcgttgccattaaaggtccgctgaccactccggttggtggcggtattcgctctctgaacgttgccctgcgccaggaactggatctctacatctgcctgcgtccggtacgttactatcagggcactccaagcccggttaaacaccctgaactgaccgatatggttatcttccgtgaaaacagcgaagacatttatgcgggtatcgaatggaaagcagactctgccgacgccgagaaagtgattaaattcctgcgtgaagagatgggggtgaagaaaattcgcttcccggaacattgtggtatcggtattaagccgtgtagcgaagaaggcaccaaacgtctggttcgtgcagcgatcgaatacgcaattgctaacgatcgtgactctgtgactctggtgcacaaaggcaacatcatgaagttcaccgaaggagcgtttaaagactggggctaccagctggcgcgtgaagagtttggcggtgaactgatcgacggtggcccgtggctgaaagttaaaaacccgaacactggcaaagagatcgtcattaaagacgtgattgctgatgcattcctgcaacagatcctgctgcgtccggctgaatatgatgttatcgcctgtatgaacctgaacggtgactacatttctgacgccctggcagcgcaggttggcggtatcggtatcgcccctggtgcaaacatcggtgacgaatgcgccctgtttgaagccacccacggtactgcgccgaaatatgccggtcaggacaaagtaaatcctggctctattattctctccgctgagatgatgctgcgccacatgggttggaccgaagcggctgacttaattgttaaaggtatggaaggcgcaatcaacgcgaaaaccgtaacctatgacttcgagcgtctgatggatggcgctaaactgctgaaatgtagtgagtttggtgacgcgatcatcgaaaacatgtaatgccgtagtttgttaaatttattaacgggagcgtaacgctcccgttgttttttgttaggctgctaacggttatcaaaattttatcaaaaaaagttatcaaaacccctcggtagttttggggtaggctggccggtcaggtggtagttctactactagtctcccacatagatattccttagctttttattattgctggcggacgctcgttaatatttaaggtcttcattgattaagacatccccaaagttagttatgtattcactgttattaggacaattatgaattaccactccttacacccgctcaaatattgttaaattgccggttttgtatcaactactcacccgggactcgccaggggacagccaacaggcattgggtgcaatcaccttagcgttcaggtacatgcggaatgtaaaaaaggccgcgagcgcggccccttcacatacatctttagtactgagactgtttaacctagggaattattatcgtattatattgcattacaactcccaacagtgacatatgaacttcctgctttactccacgactttaatatttcaaggccatgtgaagaacatatttcttgcactgcgagttcatcgagtaatccatagtaagaaacactttttgaatttttgtaaatgtatccgtaaagatgttttcttcctgtttcgtattttttgaagtatgagcttttatattgatttacaataagagtctcacctcctgattttagtaatctcttgatgctaagaactatcagataattcaaagcgtggctgtgatgataggaattatgttttttacgtgaatgagaataatcttaaatgaggaataactcattgattgacaatatttttattcaagaagtgtcattgactgttaacgcaatgttgtaaaggtaagataatctgatttatcaatattattgtgtgatttttatgtgagcagaagatattcatcagcaacgattacattagtcattttattttgccgacggcctcattgtcgaaagataagcgtacgacagtattatcagaaaagagtgattttttatccaactacacttcagcgcactgcgtgtaaaaaatgcctctttcttatgcgggatatcatcatttcatcatgatgtctttggtgagcggtgaacacaatgcacctgcgctgtctcttcaggatgaatcccctggtctggtgcctgcgggctgatgttgcagcagagcttaggagtcttagacgctactatcatttatccaatggcatggaaagcaaaagtgtcgatacccgcagtatatatcgtgaactgggtgcaacgctgagttacaacatgcgcctggggaacggtatggaaatgaaccctggctgaaggcggctgtgcgcaaagaatttgtcgatgataaccgggtgaaggtgaataatgacggtaatttcgtcaatgatttgagcggcagacgtggaatataccaggcagctattaaagccagtttcagcagtacgtttagcggacatctcggggtggggtatagccatggtgccggtgtggaatccccgtggaacgcggtggctggtgtgaactggagcttctgaccatcaacgattaaactgcgcttcggcgcagttttcgtttacaggatgttgaaagggaaaattctggggcaaaaaaagcccgccagttacggcgggaaacctcatcctatgggagaacaatgaataatgaaattgcggggttatcatctcccagtatatccatactaacaataaggttatttactcaaccaggcataaacattttgttttgtgcgtgggaacagccttaaggtgtaaagggggaggtggaaatagcaatgaggagtatcagcaagaatactcgccgctttaccacaacgtggatgagagggatgaaaaactcaaggcagagataactctgccttgaagataaatgcgcttttacagcgggcttatttcagctcttctgcttccggtaaggtcacgttcagctcaagaatagaaatatcgccatctttttgctcaagctgtacggttaccatctcaggatcaatttgtacgtatttacaaatgacctcaagaatatctttacgcaactgcggcagataatgcggttctgcatcgctgcgacggcgttcagcaacaataatctgcagccgttcttttgcaatgttggctgtgtttttcttccggctgagaaagaaatcgagtaatgccataacttatcctccgaacaagcgtttgaggaagcctttcttctcttcttcaatgaagcggaaaggacgttcttctcccaacagacgttctacggtatctgcgtaggctttacccgcatcggcgttaatgtcgagaatgaccggttcaccctggttagaggcgcgcaatacactttgatcctctgggatcacgccgacgagtttgatgcgcaggatctccagcacatcttccatgctcagcatgtcacctctgcttacgcggcctgggttatagcgcgttaacagcaggtgctctttaataggctcttcgccattttctgcgcggcgacttttgctcgccagaatgcctaaaatacggtcagagtcgcgtacactggagacttccgggttggtggtaataatggcttcgtctgcaaaatagagtgccattaacgcaccggtttcaatccctgccggggagtcacaaacgataaattcaaaatccatcgctttcagatcatcaagaactttggcgaccccttcacgggtgagggcatctttatcgcgtgtttggcttgccggcagaatatagagattttcagtacgcttatctttaattaacgcctgatttagcgttgcatcgccctgaatgacgttgacgaaatcgtaaacgacccggcgttcacaacccataatcaggtcgagattacgcaggccgatatcaaaatctatcacgacagttttctttcccttctgggccaaaccagtggcgatggccgcgctggaggttgtcttaccaacaccccctttgccgctagtaacaacaataatgcgtgccatagaaattccttgttaaaaagggatcaatttaacggttgaacggtcaaagcgttttcgactaactgcagtcgcgccgctttgccataaaattctgctgggatttgatcactcagccagtattcacctgcgatggacaccagttccgccatcaggttcgtacaaaatatttgcgtttcccggtcaccacttgcccctgccagcgcacgaccgcgcatcatgccatagacatgaatgttcccatcggcaatcaattcggccccagcgctaacgtggcttgtaacaatcagatcacattgtggagcataaatacgctgaccggaacgcaccggggtatctattaaacgcgtttttgtgaccggcgttgtattttgcgctggagcctgcggtgtgggagctggacgtggcgctttttcctttccttccgtcaggataggcagccccatcttttcaatttcggctttaagttgcgcatctttgcagccacttacgccaataacccgcaaaccggttgcgctaaccgccttatgcatcgcactccagtttaccgggtcttccagtgcactgacgttgagtacaacgggggcatgttttaaaaatgcgggggcctgagcgattttgtcttccagcgcctgatggataaccttaggttctgcctcatgcagatgaaccacagataaagtgaagctactgcctttaagctcgattggcgtgttactcatcctggccttactcaattagctattaatcatcgccagcgcgcgatgatgttccgaagactataaggcatgttatagtctggattatattgaggcaagtcaccctcccatttattcagagtaaaagtctattctgtgataaatggcgctgattcatagcttaaaaaatacccttgtcaatcaacccattgccgtcgtacttttgattgttcttatttacgcttcctttttccgcaccctaatcgtgacagcatctccagacctgtttaaatatccagtattgaggcaagtgtattttttcaccacgccaggctttcttaactttccattttttgcggcatcattaaagaacagatacccgttatcttaatatccgccacagaattgctctatcatagaaaccgcagaagacgtctgatacttctgtcaggtcatcgtaactcgtccaggtcagcggttttgattacggattgatgatgaaatgagcataagtgttgtacggttggattatcaggatgtgctatgaatatgatgcgtattttttatatcggattgagtggtgtggggatgatgttcagtagtatggcgtctggaaatgacgctggcggacttcaatctccggcgtgcggcgttgtttgcgacccgtatatttgtgtgaacagtgatggcatttccccagagttaacaaggaaatatctcggcgaaaaagccgctgaaaacttacaaagtttacaaggctacgatcccagcgaatttacattcgctaacggtgtattttgcgatgttaaagaaaaattatgtcgtgatgatcgttattttggtgtggatggtaagcggagtggaaaaatcaatcaaaccaccacaaagatgttatttatgtgtcgtgagtgatgtcttgtttacattatgttctattcgtcattaacctcttgagcgacagagaggagtggggcattaacgtttatgacggggagagtccccgtcggttgacatttacttaatttgaatatcgacgttatattttttagttttgtttttacgggcgtcgtttcgggtttgcaacactcgcagctcatatttgccagaagcagggagactgtattgtccgtgactatcgagttctggggaatatctggataaatcaacactatcatcgattcctggcccgaagaggtaagtatcagcgccttcattagagatactcacatgcactttctgaccttttttggcatagaaggtatatgtatcgtaatcgtatccctttatttcgccggagtactgagcgctgctatggccttttctgaactcaacattgacattcttacccgcagcaaagctcgtggaggttagcagtgcaagcagcaatacagccttcctgatgctcttgattttcattggtagtctcctgttcagaatgagtacgatgaactgttataatataacaatccctaacgggagaattccagtggctttcctgcgttcggtaaaatcacgttgcggcatttttgccggggggattacttataaagggggcatggactcaacaaaccgtagaaatctacagctggctggcttgtggcgcgggtttcattgatgttagcttatgccaaaacctggcatcttaaagagtaaaagtatgttttgtgtgatttatcgaagcagcaagcgtgaccagacctatttatatgtcgaaaaaaaagacgattttagccgtgttcctgaggaactgatgaaaggttttggtcagcctcagttagcgatgattctgccgctggatgggcggaagaaactggtcaatgccgatattgaaaaggttaaacaggcattaaccgagcaaggttactatttgcagttaccgccaccacccgaagatttgctgaagcaacatctttccgtcatggggcagaaaacagacgacactaacaaataaccgatatccggcggtggcattatctttgtcggcgcgggttttcatatccacgataaggtgaggggaacgttatgtatcaacatcacaactggcaaggtgcgctgctggattatccggtgagtaaagtagtctgtgttggcagtaactatgccaaacatattaaagagatgggcagcgcagtgcccgaagagccagtgctgtttattaaaccagaaacggcactgtgcgatctgcggcagccattggcgatcccatccgatttcggtagtgttcatcatgaagtcgaactggcggtgttgattggcgcgacactgcgtcaggctacggaagagcatgtccgcaaagccattgccggttatggcgtggcgctcgatctgacattgcgtgatgttcagggaaaaatgaagaaagccgggcagccgtgggaaaaggctaaagcgtttgataactcttgtccgctttccgggtttattcccgcggcggaatttaccggcgacccgcaaaatacaacgctgagcctgagcgtaaacggcgaacaacgccagcaaggtacgactgcggacatgatccataaaatcgttccgctgatcgcttatatgagcaagttttttaccctcaaggccggtgacgttgtgttgacaggcacgcctgatggcgtcggcccgttgcaaagcggtgatgagctgacagtcactttcgatgggcattctttgacaactcgcgttttgtaatactttttgccgcctgaaagcggcggcaaaacttgcatcgctgtgccagactggttataaggtgcgttttaacgtaatggcggaacacctgatgagcgatgtacctttctggcaaagtaaaaccctggacgaaatgagcgatgcggaatgggagagcttgtgtgatggttgcggtcagtgttgcctgcataaactgatggatgaagacaccgacgaaatctacttcactaacgtcgcctgtcgccagctcaatattaaaacctgtcaatgtcggaactacgaacgtcgtttcgagtttgaacccgactgcattaaattaacccgtgaaaatctgccaacattcgaatggctgccaatgacctgcgcttatcgtttgctggcggaaggtaaagatttacctgcgtggcatccgctacttactggtagcaaagcggcaatgcatggtgaacgtatctctgtgcgtcatatcgcagtgaaagaaagtgaagtgattgactggcaggatcatatcttaaataaacctgactgggcgcagtgataaatttaatagatgctgatgggggctttcttaatatacgtctggatgctcgccatttcgtagccctgtttttgaaagcgctctgtcataatgagagttacccgataccttattatcaacaggtaactctcaatctttaaaaaacgtctgtgtttttaaatgtgataaaccttataccttgagtacatggagagaataatcgcttatcagacttcaggtacctcaaagagtgtctttttaccgtgtcttttctgatactcattacaggtgttaatcatttttttggccgcttcttttagcaaagaaagcattaaatcatcataatcaacgtagaatctggttgtttcagtttccgtttttatctcaccgatggcggctatttcggtggttaatttcaatttggcggcatcgatatctttattcgcttgtttaaccgtgttagacagggtggtaaagaaattctgcacagattttaacttgttcttcaattctggaatcagttttccttcaactacgcccgcagcaatagaataggaaatgattaatccaaatggaccggcgacgacaccggctgcggcaccggcatatgcttccttcctgattttatctacctgactctggaaatagctgcttttttcactaaaatcattggttaactggctatctaacgccagcagtttcccggaagcgttgttgaaactttgactgcttaccagcagggatttttgcgcttcattcagcttcgtgatgccgtcatccagtaccttaatgagaatgtctttctgggcggatgctttcttctcattgtactcatcaaatagcaaaatatacgctgcgagcaattgcgtcgcaacaccacaccattcatacactgtttgggttgcttcaaaatacttatcctggctatccataagtaaggttttaatatcgccgactaaaacggaggctgcctgactatactcctgtttaaagcgacttaactcttttatggtttcatcaaaggtctgccaggggatgacctgatcgagatatttattataaagatctaatgctccatctgcggtttcgattgcgtttttaactacttctaccgttttatctgcaacgatttcagtcataatcattcgcctctttaaatatataaattgtaatgaaactcctgttttacaactattaataaattttacttcatctaattcatagttagccgggcgggatgcgtcaatgtctttatttctattaatatgataaatatcaaacaatgtttaatgtcattatggcgaatgcttctattctattttttagccgggtgatatttttcatttctgctggatgagcgtcgtcgccagaaggccacgtgagcacaagataagagaacgaaaaatcagcagcctatgcagcgacaaatattgatagcctgaatcagtattgatctgctggcaagaacagactactgtatataaaaacagtataacttcaggcagattattatgttgtttatcaagcctgcggatctccgcgaaattgtgacttttccgctatttagcgatcttgttcagtgtggctttcctagtccggcagcagattacgttgaacagcgcatcgatctgaatcaactgttgatccagcatcccagcgcgacttacttcgtcaaagcaagtggtgattctatgattgatggtggaattagtgacggtgatttactgattgtcgatagcgctattaccgccagccatggtgatattgtcatcgctgctgttgacggcgagtttacggtgaaaaaattgcaactacgcccgacggtacagcttattcccatgaacagcgcgtacagccccattaccatcagtagtgaagatacgctggatgtctttggtgtggtgatccacgtcgttaaggcgatgcgctgatgtttgccctctgtgatgtaaacgcgttttatgccagctgtgagacggtgtttcgccctgatttatggggtaaaccggtggttgtgctaagcaataatgacggttgcgttatcgcccgaaacgctgaggcaaaggcgcttggcgttaaaatgggcgatccctggttcaaacaaaaagatctgtttcgtcgctgtggcgtggtttgctttagcagcaattatgagctttacgcagacatgagcaatcgggtgatgagcacgctggaagagctaagcccccgcgtcgagatttacagtattgatgaggcattctgcgatctgacaggtgtgcgtaattgtcgcgatctgactgattttggcagagaaattcgcgcaacggtgctacaacgtacccatcttactgttggtgtggggatcgcccagaccaaaacgctggctaagcttgccaatcatgcggcaaaaaaatggcagcggcagacgggtggggtggtggatttaagtaatctggaacgccagcgtaaattaatgtctgctctccccgtggatgacgtctgggggattggacggcggatcagcaaaaaactggacgcgatggggatcaaaaccgttctcgatttggcggatacagatatccggtttatccgtaaacattttaatgtcgtgctcgaaagaacggtgcgtgaactgcgcggcgaaccctgtttgcaactggaagagtttgcaccgacgaagcaggaaattatctgttcccgcagctttggtgaacgcatcacggattatccgagcatgcggcaggccatttgtagttacgctgcccgggcggcggaaaaacttcgcagcgagcatcaatattgtcggtttatctccacgtttattaagacgagtccatttgcgctcaatgaaccttattacggcaatagcgcgagcgtaaaactgctgacgcccactcaggacagcagggatatcattaacgctgctacgcgatctctggatgccatctggcaagcgggccatcgttaccaaaaagcgggcgtgatgctgggggatttcttcagtcagggagtcgcgcagctcaatttattcgatgacaacgcaccgcgccccgggagtgagcaattgatgacggtaatggatacactgaatgctaaagagggcagaggaacactctattttgccgggcaggggatccagcaacaatggcagatgaagcgagccatgcttagtccacgttatacaacgcgaagttctgatttactgagggtcaaataaatatagcggcaggaaaaaagcgctcccgcaggagcgccgaatggattagcgaccgaacagatcacgttttttcgctttaaacggctgggaaatcaccaccagcactgcgacaatcaggtaagcgataaaaataccgagcagccactgcggcatttccagacctaaaaaatcccactgacgctcggcgcaatcgccagaggcgacaaacacttgcggcacccacttatccagcggcagccattccgggaaacgaaccataaaatcacaggtggcaaacgggctaggatagagctgaagcatggtgtgctcgtaagttaactgcacaccgcggaacgcactatacaaccagataaccatcgctacataacgcagcggagttttcggggcgatcgcgccaatcagcgcagcacccagaacgccgaataacgcgcagcgttcataaatacagagcacgcaaggtttcagtaacatcacatgctggaaccacagcgccgtcagttccagtgccagagcagtaaacgccatcaacagccacgcgccccggccttgactacattggttcaaaaatcgcaacataatcatttccctgcaatatgcatagagtgcgcagtttaaaccaattcattcgctgcgccaccaggaggcagcaaaaataggacgcaattggacaattatcgggcgaaaaggcaaaccgggcatttatatgcccggtaagttgttatcaaagcgttgctatccagcccatttgcataaaccattcggttacaggggcaagcgtaaactcgacgcagagcaagccgacgagtgtcaggacgagggtgtaaggcagggccatccacaccatgcggccataagagaggcgaatcaatggcgcgagtgcagaggtcagcaggaacaggaacgcagcctgaccgttcggcgtagcgacggagggcagattggtaccggtattaatggcgaccgccagcagctcgtattgcttcaacgtgatagcgccactttccattgccgctttcgcttcgttgatataaatcgtccccacgaagacgttatcgctaatggaactcagcagaccgttgaaaatatagaacaggctcagctgagcatgttcgcttgcctgcaacacaaactgaataattgggctaaacagttgttggtcgataatcaccgcgactacgctgaaaaacaccgtcaacagtgcggtgaatggcagagattcggtgaaggctttaccgatagcatgctcatcggtgacaccggtcaaacttgttgccagaataatgacactcaaaccaatcaagccaacttccgccagatgcaacgccagcgcagtcaccagccagacgccaataatcgcctggacaatcagacggattttatcctgacgggtacgctggtggcggctttgatcgtcaaactgttgcaacacttcgcggactttctccggcagcgtttcaccgtagccaaaccaacgcagcttctctaccagcaggcaggttaacaggccacaaatcagaaccggaacggtcaccgggctcatgcgcaggaagaaatcgccaaaatgccagccagccgctttagcgatgatcaggttctgtggttcgcccaccatggtcattacgccgcctaatgcggtgccgacaccggcatgcatcatcaggctacgcagaaagccacggaactgttccagaaccactttgtaatgcttgtcgatatgactatcgtcttgcaggtcggtgtcttcggtacgggaagaggctacgcggtgataaataccataaaaaccgactgcaacgctgatcaccaccgccacgacggttaaggcatcgaggaacgcggagaggaacgcagccgccacgcaaaaagagaggctcagcagcattttggagcgaatgcttaacagcaaacgggtaaatatgaacagcaacagctgtttcataaaatagatacccgccaccataaacatcagtaacagcaagacttcaagatttgccgccacctcttcacggacgtgttccgcgctggtcatgccgatgaataccgcttcgatagccaacagaccaccggggagcagcgggtagcatttcagggccatcgccagagtgaaaataaattccgctaccagcaaccagcccgcgacgaaagggctgatgaggaaaattaacgggtttacgattaagaaaatgatgagggcgagtttgtaccagtcgggggactggcccaaaaaattgcgccatagcgcgcggccccaggagatctccatgatggtttcccttaccttacaaataatcaatgatgtttttatgtttaaacgcaaagcttaacggtcaggcaggagtgaggcaagtcttgatagtcaaggggaaagagatgcggaaaatgaagccttgatccctttttcttctttttgtctgctatcagcgtagttagccctctggtatgatgagtccaactttgttttgctgtgttatggaaatctcactatggtcattaaggcgcaaagcccggcgggtttcgcggaagagtacattattgaaagtatctggaataaccgcttccctcccgggactattttgcccgcagaacgtgaacttagtgaattaattggcgtaacgcgtactacgttacgtgaagtgttacagcgtctggcacgagatggctggttgaccattcaacatggcaagccgacgaaggtgaataatttctgggaaacttccggtttaaatatccttgaaacactggcgcgactggatcacgaaagtgtgccgcagcttattgataatttgctgagcgtgcgtaccaatatttccactatttttattcgcaccgcgtttcgtcagcatcccgataaagcgcaggaagtgctggctaccgctaatgaagtggccgatcacgccgatgcctttgccgagctggattacaacatattccgcggcctggcgtttgcttccggcaacccgatttacggtctgattcttaacgggatgaaagggctgtatacgcgtattggtcgtcactatttcgccaatccggaagcgcgcagtctggcgctgggcttctaccacaaactgagcgcgttgtgcagtgaaggcgcgcacgatcaggtgtacgaaacagtgcgtcgctatgggcatgagagtggcgagatttggcaccggatgcagaaaaatctgccgggtgatttagccattcaggggcgataatcccttccgtttaaagagcaaacccctcaaacgaggggttttttgttgtttttacagatttcccattcttggcgggcaacgttccagcaactcgatgctgccgtcttcgttttgctgttcgagcatcacatcaaatccccacaggcgatgcacatgcttcaggacttctttgcgcccccgatccagcggtgcgcgattatgtggaatataacgcagcgtcaggctacggtcgccgcgcaaatccacgttccagatctgaatattcggctccagattacttaagttatattggctgcttaaccggttacggatctcccgataaccttcttcattatgaatagcggaaatctccagataattatgccgatcgtcatccagcacggtgaagaagcggaaatcacgcatcactttcggactcaggaactggctgataaaactctcatctttgaaatcacgcatcgcgaaatgcagcgtttccagccagtcggaaccggcgatatccgggaaccagtatttgtcttcttccgttgggctctgacaaatccgtttaatatcctggaacatggcgaacccgagggcatacgggttgatgccgctgtaccacgggctgttataggggggctggaagaccacattggtgtggctgtgcaaaaactccagcataaaacgttccgttactttcccttcatcatacagatggttaaggatggtgtagtgccagaaggtcgcccagccttcgttcatcacctgagtctgtttttgcggataaaaatactggctcaccttacgcacaatacgcaggatttcacgctgccaactttccagcagtggcgcatttttctccataaaatagagcaggttttcttgtggttcggacggatagcggcgcgcttcagcaaccgttttctcttcctcgcgcttcggcagggtacgccagagcatattgacctgactttgcagatactcttcgcgacttttctgccgggctttctcttcttgcaggctgattttttgcgggcgtttgtaccggtccacgccgtagttcatcagcgcgtggcagctgtccagaagccgttctacttcatcaacgccataacgctcttcgcactcggtaatatatttacgggcaaaaatcagataatcgacaatgctactggcgtcggtccagctacggaataagtaattgtttttgaagaaagagttatgcccatagcaggcatgagccatcaccagcgcttgcatggtaatggtgttctcttccatcaggtaagcgatacacgggttagagttaatgacgatttcataggccagtccttgctgaccgtgcttatacagccgttcagtctcgataaactttttaccgaaactccagtgcggatagttaattggcatgccgacgctggagtaggcatccatcatctgttcactggttatcacttcaatctggtgcgggtaggtatccagccggtagagtttcgccacccggtctatctctgccagataaacatccagcaggtcgaacgtccagtcgggtccatcgctcaaacgtgtggtgtccttattcatagaatcgatcgtcgccatacgcgcacctcattgttgtcggcgctctctgtgtggagcacctcatttcaagcatagaacacctgttaaaaaccgcgtcgccggagaatttttttctttgcgatttcttattatcagagtgccactaatccgcttctgaacggaattttatgctggataaaaagggcgttcagcaggagatactaaagacgccatattgccgcagagtcagggagatgtgagccagctcaccataaaaaagccgcatgttgaataatattttcaactgagttatcaagatgtgattagattattattcttttactgtatctaccgttatcggagtggctatgcgagttgtcatactgggaagtggtgtggtaggcgttgccagcgcctggtacttaaatcaggcaggacatgaggtcaccgtcattgatcgggagccgggggccgccctggaaaccagtgccgcgaatgccgggcaaatctcccccggatatgctgcaccgtgggcggcaccaggtgtgcctttaaaagcgattaaatggatgttccagcgccatgcgccgctggcggttcgtctcgacggtacgcagttccagttgaaatggatgtggcaaatgttacgtaactgcgacaccagccactacatggaaaacaaagggcggatggtgcgtctggcggaatacagccgtgattgcctgaaagcattgcgcgccgaaaccaatattcagtatgaagggcgtcagggtgggacgctgcaactgttccgtaccgaacaacagtatgaaaatgcgacccgcgatatcgccgtgctggaagatgccggcgtaccgtatcagctgctggaatccagccgcctggcggaagtggagcccgcgctggcagaagtggcgcacaaactgacgggcggcctgcagttacccaatgatgaaaccggagactgtcagctatttacccagaatctggcgcggatggcggagcaggcgggggttaaattccgctttaatacgcccgttgaccaactgctttgcgacggcgagcaaatctacggcgtgaagtgtggcgatgaagtgattaaggccgatgcgtatgtgatggcgtttggttcttacagcacggcgatgctcaaaggcattgttgatattccggtgtatccgctgaaaggctacagcctgaccattccaattgcgcaggaagatggtgcgccggtatccaccattcttgatgaaacctacaaaatcgccattacccgtttcgataaccgcattcgtgttggcggaatggcggagattgttggttttaataccgagctgttgcaaccgcgtcgtgaaacgctggagatggtggttcgcgatctctatccacgcggcggtcatgtcgagcaggcgactttctggactggtctgcgcccgatgacgccagacggcacgccggttgtcgggcgtacacgctttaaaaatctgtggctgaataccggtcacggcacgctcggctggacgatggcttgcggttccggtcagttgttaagcgatctgctctctggtcgcacgccagcgatcccatatgaggatctaagcgtagcgcgctacagccgtggatttacgccaagtcgtccgggccatttacatggcgcacacagctaaggaaacgagatgacccgtccgatacaggccagcctcgatctgcaggcattaaaacagaatctgtccattgtccgccaggccgcgacgcacgcgcgcgtctggagcgtggtaaaagcgaacgcttacgggcatggtattgagcgtatctggagcgcgatcggggccaccgatggctttgcattgcttaacctggaagaggcaataacgttacgtgagcgcggctggaaaggaccgatcctgatgctggaaggatttttccatgctcaggatctggagatttatgaccagcaccgcctgaccacctgcgtacacagcaactggcagctcaaagcactgcaaaatgcgcggctaaaagcaccgttggatatttatcttaaagtgaacagtgggatgaatcggttgggcttccagcccgatcgcgtgcttaccgtctggcagcagttgcgggcaatggcgaatgttggcgaaatgaccctgatgagccattttgccgaagcggaacatcctgatggaatttccggcgcgatggcgcgtattgagcaggcggcggaggggctggagtgtcggcgtagcttgtccaatagcgcggcgactctgtggcacccggaagcgcattttgactgggttcggcctggcattattttgtatggcgctagcccgtccggtcagtggcgtgatatcgccaataccggattacgtccggtgatgacgctaagcagtgagattattggtgtccagacgctaaaagcgggcgagcgtgtgggctacggcggtcgctatactgcgcgcgatgaacagcgaatcggcattgtcgccgcagggtacgccgacggttatccgcgccacgcgcctaccggtacccctgttttagtggacggcgtgcgcaccatgacggtggggaccgtcagcatggatatgctagcggtcgatttaacgccttgcccgcaggcgggtattggtacgccggttgagctgtggggcaaggagatcaaaattgatgatgtcgccgccgctgccggaacggtgggctatgagttgatgtgcgcgctggcgctacgcgtcccggttgtgacggtgtaacttgttgtaagccggatcggaggcaacgtcttctgggtgcaaaaaaatcatccatccggctggtcagcaactgtagttgttaatgtgacagagccattgcccatgatagtgtccattaaaaggatggacactatttccccggaacctgaactcaccgcacaggcgttctacataaaacgcttacgcttcattgttgactcgaactcgacttcagataaatcacgctttacccttgatggagcctgtacatagatttgtgtaattgcctgattttgatatgttcaattcaacatcaaatgaaggttaaattatggacgacaaacaattgcaggctcaggctgcgttcagcaaagcatcgcaaccggcgatagatgcttcattaaatttaagattcagcttcctcttcagccacccgtacgccaatcttcaacacttcattatcttctttctcggccaccgtccagatcatcccggcaaactctacctggtcaccgacaaccggtgccgcgcctaacaactgctggacaatttcacccagcgtttgctgcttatcacgatattctcgcccgtcttccaggccatatatcagcgcaacatcagcatatttggcgctggcttcgagaatgaagtcaccaaagaagcgttgatccagcgcgaccggcgggctctggctgaacagtttaccgagcgccggaagatcgcgttcccgaccaattacacacaacacatcgccttcgcgcagtcgggtgctgccggtaggatgaagcaactggttatcacgaaacagtgccgcaatacgcgtctcttttggcatatgcaaatcgcgcagtgccgcgcccacgcaccatttatcggcactcaattgataaacaaactgctcccacggattttccggatgaatatccaggccaacgcgactcaccggacgtcccactggcggaaccaccactttggcttttttagccgcccagctgagacttgttccctgcaagagcagactaaccagaaccacaaagaaggcgacattaaagaacagacgtgcattctccagccccgccatcatcgggaacacggccaggatgattggcaccgcgccgcgtaatcctacccagctgataaacacgcgctcacgcagattgaaaccgcggaaggggagcaatccagcaaatacgctaaggggacgggcgaagaatatcatccatgcggacaaaatgagcgccggaatggcaataggcagcagatcgcttgggttaaccaacagccccagcaccaggaacatggcgatttgcgccagccaggcgaggccgtcgaaattttgcaggatgccgtagcggttgcgaatagggcgattacccagcagaaaaccgcacagatacaccgccagaataccgctaccttccagcgcagtagttaaactgaaaatcagaataccgccacttaatgccagcaatggatataatccggcgggcagggcgatgcggttgatcatttgcagtagtaaataaccgccgccaagacctattacaatgcccagaccaaattgttgcagaatatcgacaatgaacatccagctaatattgctctcatgatgctggatcatcgcaattagggtaatcgtcagaaagaccgccattggatcattactgccggattcaatttccagcgtgctgccaacacgttcgttaagccccttaccacccagcagagaaaagaccgctgcagcatcggtagagccgacgatagcgccgattaataagccttcaatcaaatcaagattaaacagccacgccgccatcatgccggttaaaccagaggtgataagcacgcccagcgtcgccaggctcagtgccggtcctaacgccacacgaaaggaactggcctgagtgcgcatcccgccgtcgagcaaaataatcgccagtgccaggttacttaccatgtaggcgaaggggtaattatcaaacgggataccgccgacgccatcgactcctgccagcatgccgatcgccagaaaaataaccagaataggaatgccaagacgggaagaaaaactactaagtaatatactgctggtgacaaggatggatcctaagatgaaaaggctaattattgttgtggcatccaacggtcggttactcctgattacgctgtctcttatataaaccctaccatattagcggcagagacagcgttttacttagccctgaagcgtgatttttttacattttaagaacaggatgaccgctaatcgtcaactgagtgccttcccgggtgttattcagaatggcatgtgcgcccaacggcagcgtaaccgtgcgttgttcatgaccaaaatcgaggccggtaatgagtggaatgctcaggcgggaacgcaaaaacgcgtacacactctccaggttgtaacctgcgtcataatcattgggcgtgctgccgctaaagctaccgagaataatcgccttctgacgtggcaaaattcccgcatgatagagctgcaacagcatacgttcgacccggaaagggtgctcgttaatatcttccagcaccagaataccgttctcaatttttggcatccacggtgtaccgatcagactaatcagcatcgcaagattgcctccccacaacgtgccttcggcccgacatgtcgggccttccccttgccattcaatggtgaaggtttcattgcgtaacgccagccagaaatggtgctcggtaaaggcgttcagttcatccgcgccaaagtttgctaccagcatggggccgctaaaggtgatgacattgccatgcgccagaagaccgcactgaatggcggtaaaatcgctatgtccgcaaatgagcaacgggtcatgttgttggcgagccaccagtgcctgccagtcaatatctgccagtaaacgactggcaccgtaaccgccgcgtacagccagcacgatggtgttgggggtagtcagtctggcaagggaattgagatcttccagacgctctgtttccgtacccgcaaaacgctcacaacgacgggcaataacctcgacgttattgacttgatgccccgcgtcggtaaggcgctggataccacgcagcgcggcgtgctgtttaatgcagtaaccgcttggggcaattaagtgaaacagagacatggcaattccttgctgacaacagaaacgaaatgtatatcatgccgcttaggtgtgccgttgtcacctcaacggcgattccaggctataaggatagaagaagtgaaattgagatggtttgcctttttgattgtgttattagcgggttgtagtagtaagcatgactatacgaacccgccgtggaacgcgaaagttccggtgcaacgtgcgatgcagtggatgccaataagccagaaagccggtgcagcctggggcgtcgatccacaattgatcacggcgattatcgctatcgaaagcggtggtaatccgaacgcggtgagtaaaagcaatgccattggtttgatgcagttaaaagctagtacctccggacgtgatgtttatcgccgtatgggctggagtggtgagccgacgaccagcgagctgaaaaatccagagcgtaatattagtatgggggcggcttacctgaatattctggaaaccggcccgctggcaggcattgaagatccgaaggtactgcaatatgcgctggtggtgagttacgctaacggggcaggtgcgctgctacggactttcagcagtgatcggaaaaaggcgatcagcaaaatcaacgatttggatgctgacgagttcctcgaacacgtagcgcgaaatcaccctgcgccgcaggctccgcgctatatctacaaacttgagcaggcactggacgcgatgtaaatcagtcgcgcactttgtccgctttttcccgggcttctcgctcgagagagaaaataatccgctgtaattgccgctccaccgtcgggctgacgttaagaaaacggaagctcagacggggagtggtgatggtttcattcttgccatcaatcactttgcgctcgctgatggagattaactgggcgtcaaagtgaaaaacaccccattgccccatgttgacttcaatctgagcgaagcgcatgccttcttgtaattcggcaggctttgctgtttccagtaatgcgcccatgccgcctaagctcaaatcatacaggcggaaacgtaacgtactgttatccgccagtttggtctggcaaaaataaggcggatggagtggggcggagatgcggaaatatcggcgtcgttgtacaaaccataaggtgggaggcggtacggtaataaatgccggaagctgcaagtattcactctgctgtagttgttcaacagtaaactcgactttcgcaccctgagtttcggcggtaatggtaatgtgctgtgcctttagcacggcgatgttgtcttcggcttgactgccgaaatccagcaccagtttatccggggttattgccagtaatttgctgatcagctgcccgccattccaactgagacgcaaaggaattgcggctttgtgcaaatcgcgtaacacgcccaggacggctaacggattttgtttcaggaactgctcatggtaatgactcacgcggaaaaactcctgactgacaaactgtctttggtttatcggtcacagttaacaaaacttaatacaaatgcgtgaatattttttacatgttgttcttaaatcagccgacatacgcccagcatcgatcccgcccttgcctatacttagagcgttgatgtaagcatttcttgcgtccgattcatcgaaacgagggcctgaacatgggaattattgcctggattatttttgacctgatagccggcattatcgccaagctaatcatgccggggcgtgatggtggtggatttttcctgacctgtattctcgggatagtcggtgcggtggtcggcggctggctggcgaccatgtttggcattggcggctccatcagtggttttaatctgcacagcttcctggtggcggtggtgggagctattctcgttctgggcatattccgcctcctgcgaagagaataagattttcataaggcggatagcgatacagatgccgctatccgctttcacatcagaacgtatactcgacacctgctttacgggtgaaaaaaatcaatatagcacttcgatatccgataaagtcggttcccggtaacaacaacagaatccttttttaattattgtttcgttgtttttggtgtgattcagaaaataaatattttagacagtagccagagtggcgttaaaaatggggcggatagtgaggcggttttggctgcgcttattgaacatttagaattgatcaatccttctggcagattaagccaaaatacccgtagcgcaatgcttcagttacgcgaagaggaatggtctgaattctttttttggttgctaaattctctggagtgtctggattatgtgattattaatttaactccagaaagcaaaaaaacgttgatgagtgaacaccgtaacaatattcaggtagcaattgatgctttatatagccaacgtcggcgtaaaagcccgggtgatgaaagtgaaacacttacccgtagaaatgacgctatcttcggcaaccacgtatggcaaacatttgcgcaatacttcccgccaggacttgaaaaaccgtctgtgtaaaaaaaaccatagctatggtgttatctgccgacaacgccatccggagaagccgaatgacgttgtcggagtaagcgctggttaaggtgtgggttgtgcctctttggtactgggttgcgtcgttgcactcttaacggtcggacgcgtcgccggaacattgtcacacggttgctctttcgggcagatcaaatccagcattttcagcgtcacgccattggtccagccaaagccatcctgtaatggatattcgccaccgccgccccccgttccggtggtgctgacatcatatttttccaccagctttttctcccggtcataggtgtgctgaacattggtcaggaagtgccagctaatgtccatcgccacctctttttgcccgtagttttgtaatccttctgtcgcgacccactgtaacggtgcccagccatttggcgcatcccattgttgcccacttttcacgctcgtggtgttcaggccgccgggttgcagcagatgtgttttcgtcgccgtcgccattttgttggcgcgatctttcgctgccgcattgacgtacagcgggaacagggcggccgcggttaactgattgcgcactttatgacttttcaggtcgtaatcggcataccagccttgttgatcgttccacaggtatttttcgatccctttttgacgggcatttgccagcgtttcgtactggtttgccatcgcgttatctccggcagctttgctggcgcgggcgaggattttttccattttaaacatcaggctgttcagatcgaccggtacgatgctggtggtgcgtaaggtatttaactgctgcgggttgtccatccagcggctgctgaaatcccagccagacgcagcggcagagcgcaggtcgcggtaaatttcagtggcaggtcgattcggattgcttttggcggtggcaatatcttccacccaactctctggtcgtggcgtatcgcgatcgtcccagtagcggttgagaagggtaccatcctgaagtttgacaacgcgtttttcctgttgtccggcttgcaggttttcaacaccgtccatccagtaagcatattctttttgcatttgcggcaggtattgcttcaacgcggcatcgccttcatgctgcgccagtaactctaccatcagggcaaagaagggcggttggctgcggcttaaatagtaactgcggttgccgttgggaatatgaccgtaagtgtctatttcatgagcaaaattggccaccatatccgcgactttatcccagtgaccgctttcggcaagtcctaacatggtgaagtaactgtcccagtaatatacctcgcgaaagcgtccgcccggcacgacataaggttccggcagcggtaacagagaatcccatttttcggtgttttcggtagaacgcgttaataccggccaaagtccgtcaatatgttcgcgcagactctgcccctctggcggaacatatttctcgccttctttcggcagggtgaaattgacgttaacgaaatggcgcagatcaaatccgctctggttttgctgcatccgataatcagcaaggatcatcagcggatcgctgttcggcacggcatcggcaaaggttttttggtccggaaaaagtttggcgttttgcacatcattaaacagcggccctaataaaatatcaggcggctgtggtgttaccggtgtttcttctgcctgcacgcttagcgcagcgaaacacaaaaagatacaggctggaattaacgccattttttgcgggcgagaaggtgcgggggatttcatcaatcattctcctttggcgaaaccgaataaaacggtattcaagtatcagaaaaccttagttcaggatcgcactagctgcatgatcgaaatctcattctgcgaactgtcaggcattttagaaaagggaattaaagggataaataacggcgaaatagagtgatcaaataacgtctgtttattagccagccagcggcgttgggttcgtgattagcgaagaaaaatcatcataaattggtgaaaaatataacaggtagttaaaaaccattagtgctgagtaaattgccggatgacatcagaacgatgccatccgaacagtggcttaaccctgacggttgaaacgttgcgttttaacgtccagcgttagcgtttcttctggttgtatcgcatacagtttctcaccctgctggcaaatccagccaatccccagttcacgggcgattagggcgctgtgggataccggacttccggcgctaaggcagataccttttacaaccgccggatccagttgcagtactgtggaaggataaatgttctccgccagtagaatagttgggctgttaaactgcgggagttcttctttcgtttgggtcaggtggaccagggtgcgatgcagaagatcgtccacatcaatatagcgagcttgtagatattcatcatccagttgctggtattgctggctaagttctttaagaacttgctgccaggcatattctgccgtgcaatgttcatgctgaaggagttcgcttgccgccgccagcagttccggatcatctaacagtgtatggtgaccagaaaagattgcggcaatatcgtcaagcccgctggcttctgctttcgctgttaacgtcatcagatctaataacgtgaagtcaatagcctggcgtaatcgatcttgttcttcttccacggtcagggtactttttgcctgtaccgtacataaaactggttgataataaaaggctttaccgctaacaggcggaacgggacgcagagtaggtggagcgacttcctccgtttcaccaaagttatcttcagccagctgacggaaagcgatcagtgcctcttcagcttctggccctttcgcaatcaggcgcagcgtatcgttatagcgaacttgtagtaacgcaatctggttaatactctctggtgtgacgcatttgccgtttttttccagcaacatatcggcattaaatgtgcttaaggtataaaccagccgggaggccggacgtacatgcaggccgttacggttttttatgaccaccgccagagaacgggcttcttcatcgtacgcaggacatgtgtcagagatttcagtgtcggaggacggtaaacccagttgttcacgtttggcttccagcgcatgcatggcgtcaaagataactttgtcgatatccgccccgctggccgcgctgaccgttgctgccagtgtaccttcgaccaacggcgcagcacacaaacgtacttttgcggcgatctcgggagccagcaattccagcgcagtttcagcactcaataatgcgctacccatatccatcatgaccagcacatggtcggcatcagcaacagattcgatggcctccatcactttgacggcatcggtaccaatgggattttgtggatcgtcaattcccgcggcaatggcgattttacaactatcactcattaacatctgacgggctaattcaccgacaccttctcccagtcggctgctatgactaactatgaccaggtttaccatcaccaattccttactcttttgcggctaacgccaacatttgcatcataaacatcacgctggtcgcgccgggatcctggtgaccaatactgcgttcaccgagataactggcgcggcctttgcgggcttgcatcgtaatcgtactttgtgcagcggattcggcgatgctactggcagcttcgagcgccaccggaacagagagattttgctcgctggactgacgtaagctttccaccaccggcacccacacatcacacatggttttatcgccaggttcggctttcccgcgactgattacgccgtccgcgccatcgcggaacatctgataaagctcttccagtgtcaggctttgccgtgcctgggtcgcctgtgcggcgcggataaagaaggtaccgaacagcggaccactggcaccaccgacgctggaaagcagcgtcataccggtattcttgagaatgaaaccgatatctttatctgcgatagcagggagtttttccaccactttgctaaagcctcggttcatatttagcccgtggtcagcatcgccaatttcgcgatccagtccggtaagatactcgctctcggtgctgaaaatatcgccacaacgagtgagccagttaacaatttgagttctgctcagactcattgctttctccttatttaccccagttaagggccggggtgtggaccggggcgtcccagagtgccagcgtttcgtcatcaactttcagtaaggtgatactgaaaccggtcatatccagactggtgcagtacgcgccaattaaattacgttcgatagtcaatcccgcttgctggcaacgtgtggtcaggcggttatagacgccgtacagctcagaaagcggagttgcgccaagattgttaaccagcgcaatcacccgatcgccagactggagcggttgtttggtttgttgttcttcctgccaactgccttgttgataatcccagaaacgcaaagtgcgatggtaactgccatttaccagcagggtgtcgaacatttcatcgacggtttgatcaagggaagagaaggggcggcggtcaatacccggctcaccatgaatgccgacgccaaactccatctcattatccgccagggtaaaagaaggtttgcccgcggcaggaacggtacaggcaccgagagcgatacctatactgtggccttgattattcagcttacgccccagttccgcacaggcgtccagactgtcgccacgctccgccgctgcgcctacgagtttttcaattaatacggtgttggcaacgccgcgtcgcccggcagtataaagactgtcttttaccgcaacgtcgtcatcaatgaccacagtggtcacttttacgccgctatcgtgcagtaactcggtcgctgtttcaaagttaagaatatcgccggtgtaatttttgataatcaacagtacaccttcgccgccatcaacttgcatggcgcattcaaagattttatcgggcgtcggactggtgaaaatttcgcccggacaggccccgctaagcatcccctgaccgatataaccacagtgcatcggctcgtgtccgctgccgccaccgctcagcagggcgacttttcctgcaacaggggcatcagctcgggtgacatacaccggatcctgatgcagtgtcaggcttggatgcgctttcgccagtcctgccagttgttcgtccagtacgtcttgcacatcattgatcaattttttcattattttgctccagcaattacggtagggcatggatgatgttcaacgacacggcgaccactgactgccgatgaatccattgtgcatcaggcaagggaaaagaaaattagcccaaattatgtttcatagtgaaacatatgctttaatgaatgttccatattgaaacttttacgtgtattaatacttaaaattgcgagccggaacaccttttgtcataagggatgcgggatatgagtggcgcttttaacaacgatggtcggggcatatctcccttaattgcaacctcctgggagcgatgcaataagctgatgaaacgggagacatggaacgtaccacatcaggcccagggcgtgacatttgcttctatttatcggcgtaagaaagcgatgctgacgctcgggcaggctgcgctggaagatgcctgggaatatatggcaccgcgagagtgtgcgctgtttatcctcgatgaaaccgcctgcattctcagccgtaatggcgatccgcaaaccttgcagcagctaagtgcactgggattcaatgacggcacgtattgcgccgagggaattattggtacttgtgcgctaagcttagcggctatctctggtcaggccgtgaaaacgatggccgatcaacatttcaaacaggtactctggaactgggccttttgtgcaacgccgttgtttgacagcaagggccgattgacgggaacaatagcgctggcgtgtccggttgagcaaactaccgcagctgatttgccgttgacgttggcaatcgcccgcgaggtcggaaatttactgctgacggacagtttgctcgctgaaactaaccgtcatttaaatcaacttaatgccctgttagaaagtatggatgatggcgtgattagctgggacgagcagggtaatttgcaatttattaatgcccaggcggcgcgggtcttgcgccttgacgcgacggcaagtcagggacgggcaatcactgaactcttaacgttacccgccgtattgcaacaagcaataaaacaggcacatccgctcaaacacgtagaagcaacctttgaaagccagcaccagtttattgatgcggtgataacccttaaaccgataatagaaacgcagggaaccagctttattttgttgctccatcctgtggaacagatgcggcagttgatgaccagtcaattaggaaaagtcagccataccttcgctcatatgccacaggacgatccgcaaacccgccgcttgattcattttggtcgccaggcggcgcgcagtagctttcctgtcctgctttgtggagaagagggcgtgggcaaggcactgctaagtcaggcaattcataatgaaagcgagcgtgctgcaggtccttatatcgccgtcaattgtgagttatatggtgatgctgcgctggcggaagaatttattggtggcgatcgcacggacaatgaaaatggccgtctgagtcggctggaactggcacacggcggcacgctgtttcttgaaaagattgaatatctggcggtggagttacagtctgctttgcttcaggttatcaagcagggggttatcacgcgactggatgcgcggcgtttaataccaattgatgtcaaagtgattgcaacaacgaccgcggacctcgcaatgctggtggaacaaaatcgttttagtcgccagctgtattacgcgctgcatgcatttgaaattaccatcccgcctctgcgtatgcggcgtggcagcattccggcgctggtgaataacaaattacgcagtcttgaaaaacgcttctctacgcggctgaaaattgatgacgatgccctcgctcgcctggtttcttgtgcatggccaggcaacgattttgaactttacagcgtcatcgagaatcttgctctgagtagtgataacgggcgcattcgcgtcagtgatttgccggaacatctgtttaccgagcaggcgacagatgatgtcagcgccacccgcctttccaccagtctgagttttgcggaagttgaaaaagaggcaattattaacgcagcccaggtcacaggcggtcgcattcaggaaatgagcgctttacttgggatcggccgcactacgctgtggcggaaaatgaagcaacatggcattgatgcagggcagtttaagcgccgggtatgaaagacagaaacgatttctgatacatcagagtgatctgtatttcattccggcgcacgctaacaattttcagcatcgtttaagggcttgtctatcccgcacttaaaagctgaagcgatatcctccgttgacttgcttctgatcaaagaggttaccctgcgtgtaatccgcttcgagatagaatgtgtgctgtttgttatactgtgcactgactcccacgccgttattccagccattacctttgaaactgtacttctcccgggagttgttcaacagatattcggtatccccactaaactcgcggatagcgccagtcttcacatagacattcagctggctgttgcctgcggtgatgtcataccccagtatcatgctggcacgccccagcaggctttcgtagtgattcagatgtatattgaggccattactcgccttcatagtcatctcattctggtggctgtatgtaagctgggtttgcggctctatatagaacccataaccagtaggggacaggttgaacctctgcccggcttccagggagatgctcattccattcgcagtgccgttggcgttaacgccgttgttctgactgtccagtacgtggaaactatttttctggcggcttgcttttataacgagatcgctgtaaaaaccgttttgtgccatgtaactggcgtacattcccatgtagtcactacgtgcggtaccgtcgcctccgctatagtccgggcttgcatgtgtactgccaatatacagaccgacatacaacggcattacatcagagagacgtttatccccaccaaactggataccgctgtaacccatgtcaaagccgctcagtttgccactggcaaaggagtccaggcttcccccataactgcgcaaccagatattaccgtctttactctgatttcgcaggtcacccatccgttgcatcagcgtacggttttcaacatagttcaataagtaaccgacattgagataattgccgccagcatctgcggtcgtggtgggtttaggcgtgggagcgggttcaggcgtaggatcggggttgactatgggaggctgagcgggagctggtgtgggttcaggattaggagtcggttccggaactgtcccggaagcgtaaagctcccagttagtgccatttttacgcacatcgtacagatatccccccaactcaacctgagaagacgcgctgaagctggccgcgccgtcagtggtttttaccactgtcagaacttcatttcccgttgtggcctcgctgccctggttgcggatagccaatacgtgattaccagcactactcccgctgatattcaataaatcccctttattattaacgccattaccctcgccaacaacatcagcacgcataataaaggtactgttaccgctcaggttctctacgtttaatgtggcaaatgtgccggcagtactcccgtggctggcaaaatcgacagtactatggctcagcgccagcgtgtcgagattagaattacttgttacgttccagacgctgttattcattgcaacgtccagttttccgccattgacattatcgctgagggaggaacctgtccaaacgttcccagggtgcatatccagattgattagcccacctttggaaagaacgctaccgttgataagcatacgaccgctggcgttgatgcggctggcggcataaccatcgtcatgttgcgttgcgatggccatctggtcgggtgtactcatatcaatgaccagatcgctcgtgaggtcgatctggctgttggtcatggcataaattcccctggctcctgccgcgccggtgatagccaaactgtctccggttattctaccgccgctgagagcccacaaacccagcgccagactgccattacgatcaactgtaatatcggtattttgcatgttgacaacagccgttgccgtctgggcgctggcaccataagaaccgccggaaaagatgctgtttcgttgcgctgccgtgccagtaaaattgattatcgcgtcactaccactggtgacgaggccaccgccctgcgcggaagaaatatggctatctgcaccgatagtggttgtaccaccacgaacttcgacgccattggccgcggctccagttacatcaacagtgagtgcattcgcgctaacctggccaaagctccagaggccgtgagcattatcgccattggttttaatggtactgtttgttccgagatcgacaacagagtttttctgtacgtttatccccatggcgctgtagccctgaacatcgattgtcaggtctgtagccgtaaaacgcgcagcaccattggcgttattgccgttgagaccaccgatataaacacctgtacttccatcggtcgtgattttacttccgcttccaagatcgacactggtgccatagtcattgatggttaggcctataccgttgctgttttcaatggtgaattgagtggctgttagtgtactgctatgcccaataatgatgccgtcatcgttactcttaatggtgctgcctgtgcctaagtcagcatgggtatagtcaccaattaagttaatgccgatggcagaggtttgaccaacaacatctactgtgagtcggttagctgtcagggagctgtttttgccctgaataatgattccttttgcatatccagaggcgtcgttgacattgacggtgacatcattacccaggttgatattgccaggcgtgtttcctgctggggtcattacaccatagaggtttccacttggatcggcggtatctcctgtaattctgtcaccatcattaatagtaatattggtgccatattgacttcctgtatcagcagctatcagcaggggggaaaagataattgcattcaaaccaatagcgccaaattttatcagttgaatactggggctacggatttttaattcagcgagacgatctgctttggtattcccattgtgttgtttgatgcccataccactcctatatagtacccagactatgggtctatggattttgtcattttgtttaaatcaatgaataatatcctcttatcatcatgatatttgtatggtgcaatcatgatgagcttctcagagaataattctctattaccgggcaaaatcaggaacacaggaattaatatatatttaacatcccccttacaaaggtgagtttatatcgagttattccctaagttgtcgttacttattccaattcgttactataaatatggcaaaaatattacaacaaacagcggttaaaaaatttggtgaagattttttgtaataatcctaattagttatgggaatttcgcttgatgtatctgcataacaaaaacaatatgcgccatttttgcattactaataagaaaaagcaaaaaacatcgatattcatttttggtcaatgggttttctggcctatcgttgttattgtgctactggttatcattttcatcttgccagcatattggagcgtgatcaattttgatcagctgtgaagggggctgatgtgtagtgatacaaaaacttacgttatatcactgctaatgagatatccggcatctgaacacttatgtctttaattattctcgtggttcactataggcaataagcacaaaagtgtaggatgttacaagaatgattaggactcggtgaaatgaaaaatccacgcaattgcgtggattttatatacttttgcgctcttcatgagatttagcgaaacctcatgagacaataaattaattagacgttgaaaaggaagttcatcacatcgccatctttcacgatgtaatctttaccttctgcacgcattttgcctgcttctttcgcgccttgttcacctttgtaagtgatgaaatcttcaaagctgatggtttgtgcacggataaagcctttttcaaaatcagtatggattttgcccgctgcctgcggcgcggttgctccaaccggaatggtccatgcacgcacttctttcaccccagcggtgaagtaagtttgcaggttcagcagtttataaccggcacggatcacacggttcaggcccggctcttccagcccaagctcctgcataaactcgtcacgttcttcgtcgtccagttcggcaatgtctgcttcaacagcagcacaaaccggaaccacaacagaaccttctttcgccgcgatttcacgcacctggtcaagatatgggttgttttcaaaaccgtcttcgttgacgttggcgatgtacattgttggtttcagcgtcaggaagctcaggtaacgaatagccgctttctcttcagcgcttaaatccagcgcgcgcagcatacctgcattttccaactggggcaggcatttttccaggaccgccagctcagctttcgcgtctttatcgccacctttggctttcttctgtacgcgatgaatcgcacgttcgcaggtgtcgaggtctgccagcgccagttcggtgttgataacttcaatatcgtcagccgggttaactttgccggaaacgtgaatgatgttgtcattttcaaagcagcgaacaacgtgaccgatcgcttcggtttcacggatgttggtcaggaactggttacccagaccttcgcctttgcttgcgccttttaccagaccggcgatatcgacaaattccatggtcgtgggaagcgtacgctgcggttttacgatttcagccagttgatccaggcgaggatcaggcattggtacgacgcctgtgttcggctcaatggtgcagaatggaaagttggccgcttcaataccggctttggtcagcgcgttgaacagggtagatttcccgacgttgggcaaaccgacgataccgcatttgaatcccatgatttaaatcaccttaatatcttaataatcaacctgttattgctaacagattgcagaaatggaaataactttgcctattatacacggcactcggcaaaaatgccgcagacaacgacttattgcgctttaaaggcgtgcaatcggttcgttgctttggtcaagccatctgtaaaccacatttcagtacaacgcgccgcttcgtcaatggcttcatcaattaacttctgttcactaacaggcggtttgcctaacacaaaaccgacaactttatttttatcgcccggatgaccgattccgatgcgtaaacggtgaaagttagggttattacccaatttactgatgatgtctttcagtccattgtgaccaccatggccaccgcccaatttaaatttggcgacgccaggaggcagatccagttcgtcgtgggccaccagaatttcgtccggattaatgcggaaaaaactggccatcgccgcaacggctttgccgctgagattcataaatgtagtcgggactaacaggcggacatcttcgcctccaagagtgactcggctagtataaccaaagaatttagcctcttcgcgcagcggagcgcgcaaacgctctgccagtaagtcaacgaaccaggtaccagcattatgtcgcgttgcggcgtattcagcaccggggttcgccaggccgacaatcaatttaatcgtcacgtttttttgtcctgagtgtgtacataactggcgcgtagtttactggttgcggccccgcttgacaaaaaactgcgtatcaaatgcagataacgtaataattgcctgagtggactattagaaagtcaaggtgttcaggcgtttatttgtaaagttttgttgaaataagggttgtaattgtgatcacgcccgcacataacccactgggtgttgtctatactttacacataaggaagaggggtattccctgttacaacccagaaagttccggaggtgacatatgaaacgcaaaaacgctagcttactcggtaacgtgctcatggggttgggtctggtggtaatggtggtcggcgtggggtatagtatcctcaaccagttaccacagtttaatatgccccagtatttcgcacatggtgcagtgctaagtattttcgtcggtgccattctctggctggcgggtgcccgtgttggcgggcatgaacaggtgtgcgaccgttactggtgggttcgccactatgacaaacgttgccgccgtagcgataatcgccgtcatagctaacaaataatgcagtttgctgaccagtcagtttgcgctgactggtcaatctcgtacttataaatccgccatcgccgcgcgacgattcgggaagaacgccaggcgtcccgggatcggttgaatgccagcgcgagccatagtgcgcagtggctggaattccacgttgcacacgcgcagttcacatccctcgggcagacgcttcacaaaacgctggaacgcatcaagaccaccagcatcaagtaccggaacggcatcccacttcagaatcacaatccgtttgccttcaagacgactctccaggtccgtgaataagccttcagcagcagcaaaaaacagcgggccaataacgcgcagaaccaggacatcgtctggaacatctacgactaccggtgccaggcgagtcatacgtgcgatacgacgcataaacagcaggcttgccagcacgatccccacgctgatggcaataaccatatcaaacaacacggtcaggctcatgcacagcagcatgacgatgatgtcatctttcggcgcatgacgcagcaagtcgaccactttgtgcgcttcactcatgttccacgccaccatcaacagcagggctgccatggcggaaagcggcagccaggagagcagcggtgccagtaccagcagggcaagaataaccagaatagagtggatcaccgcgctgataggggacgttgccccggcacggacgttagcggcagaacgcgcgatggcagctgtagcggtaataccaccaaagaacggagcgataatattccccagtccctgtccaaccagttcgctgttcgccttgtgtttcgtcccggtcataccatccagcaccacggcgcagagcagagattcgattgcgccgagcattgccatactgaatgccgcaggcagcagtgtgcgaatagaatcccaggttagcgtgaattcactattaggcagatcccacggcagcaccagttgcggcagcagttgcggaataccgttaccctgagaaccatcggccaggacgtagtggaattggctaccgatggtagcaacatgtccgccgagcaggttaacaatccccatcaccgcgcaaccagccagcaaggccggaaggtgaccgggtaaacgaatgcccagacgcggccaaaaaacaagaatacctagcgtcacaatgccaatggcagcatcacccacattaatggtcggcagcgccataaataatgcgccgactttttgtagataatgttccgggacatgggccatttgcagaccgagaaaatctttaatctgcatggtaccgatggtgatcccgataccgctggtgaaacctaaggtgacggaaaccggaatatactcaatcaggcgaccaaagcgtgccagacccatcagaatcaaaaagatcccgctcagcaaggtcgcaaccagcagtcctgccagtccaaactgttggctcacgggatagagaattaccacaaatgccgcagtcggaccggaaacgctaaagcgactcccacccgtcagagcaatgacaatccccgcaacagctgcggtatataaaccgtactggggtgccacaccactaccaatagccaacgccatcgccagcgggatagcaataatcccgacggttatcccggcaatcaggtcacgggtaaaccgtgcggcagtatatttttctttccagcaagcgtcgatcagagcgcggaaaggcatcacatgactggaaaatattttgttcacaataatgtttcatccgtgagcgcatcatctgtcaactaaatggcaggtgaaggaggcataggtcatacaaatggatattacagacaaaaaaacccgccgcagcgggtctttgagccgggttcgattagtgttcgaacatggcagagatgctttcttcgttgctgatacgacgaatcgcttcggccagcataccactcagggtcagagtacgcacgttcggcagacttttgatttcatcgctcagcggaatggtatcgcagacaacgacttcatcaattacagagttacgcaggttgttcgccgcgttgccagagaagatcgggtgagtcgcgtacgcaaatacacgtttagcaccacgttctttcagagcttcagcagctttacacagcgtaccgccagtgtcgatcatatcatcgaccagtacgcagtcacgacctgcaacgtcaccgatgatatgcatcacctgactaacgttcgcacgcggacgacgtttgtcgatgattgccatatcggtatcgttcagcagcttagcgatagcgcgggcacgcacaacgccgccgatgtccggagaaaccacaattgggttatccagattcagctgcagcatgtcttccagcaggatcgggctaccaaatacgttatcaaccggaacgtcgaagaaaccctgaatctgttcagcgtgcagatccactgtcagcacacggtcaacaccgacgctggagaggaagtctgcaaccactttcgcagtgattggtacacgagcggaacggacgcgacggtcctggcgcgcatagccaaagtaggggataacagcggtgatacgacctgcggaagcacgacgcagggcatcaaccataacgactaattccatcaggttgtcgttagtaggggcacaagtggactggatgatgaaaatatcaccaccgcgtacattttcattaatttgtacgctgacttcgccatcgctaaagcgacctacagcggcgtcgccgagactagtgtacaggcggttggcaatacgttgtgctagttccggggtggcgttaccagcaaaaagcttcatatcaggcacgagaagaacctcaggcatgcgtccattggtggaaagaatctgccgaaaactgtgcgggccaggcatgatcctttccaggcggtgtattaaagagcgcgatgcaacgtctggaacaaggtgacgttgtcaccgaaactcagcttgcccggcttaaagcatggctctgtgcaatggggaaagattagcgcctttcgccacaaagccattgagccattccggggcttgctctagcacctggcgggcttcagactctgtatcaaattcagcaaagacacaggcccctgtcccagtcaggcggctcggggcgtattctaacagccaggaaagcaccgcatcaacctcgcgaaaacgttttcttgcgataacctcgcaatcattgctgaattcacattttagcaacgtttctatactcctttttggcgtattgcgcgggagttcaggatctttaaaaatcaccggagtcggaatacttacaccagggtgcgccaccagataccacttctctggcggatccaccggcgttagtatttcaccaacgccttcggcaaacgcggcatgcccccgaacaaagacaggaacatctgcgcccagcgtcagccccatttccgccagctcatccatgcttagcccgcattgccagagatgatttaatgccaccaggaccgtcgcggcattggaactaccaccgccgagaccgccgcccatcggcaaacgcttgtcaatgctgatattcgcaccgcttcccgtcggaagacgcccgctgtctgccgcagttttcatcaacaatcgcgctgcgcgaacgatcaggttatcttcatgttccacgccttcaacgggcgttaacagacgaatatccccatcgtcacgaagctcaatgctgatggtgtcgccgtaatcaagaaactgaaacagcgtttgcagcgtgtggtaaccatccgcacgctgaccggtaatgtataaaaacagattaagttttgccggagagggccactgtgtccgcattatttcactatccagttatccatttttaacttgatgcgttgaccaccgtcggtgagttccatattggctggcatcgcaggttgcgttttggtgtcataaccaccataaacaaccttccagtttttgccattctggctgtaggtaatttcgctcaggcggtactggtcgtccagtttgtagtcggttgcatcacccggtaaacctaaaatccactggcgcaagctgttgagcggaattggcattccggtcaatttgccaatcatctcttcggcgtcatcggcggtataacgctgacctttattgtcgactaactgcacgttacccggttgagcattcagctccagttccgtgctgcccaatgggttagtgagcagcagacggtagcgatcctggccggtttgctgccagaaaaagcgggcgtacactttttgttggtcagaaatataagcgaacgcgccgcgagtctgatactgattaagattgcgcacgtcttgctgatgctgacgccattgtgggctatccgggcttttgccaggacctttgggcgtggtaacggaacaggcagtgagcacaagagcagccagcggtagcaggcggataagacgaaaatcgggcaggggcatagtgatgacaagtccttgagatacgttgcagttataacccttaatgctagcgttaccgtccgctatcgtctatgttcaagttgtcttaattgccagaatctaacggctttcggcaattactccaaaagggggcgctctcttttattgatcttacgcatcctgtatgatgcaagcagactaaccctatcaacgttggtattatttcccgcagacatgacccttttagcactcggtatcaaccataaaacggcacctgtaagcctgcgagaacgtgtaagctttagcccggataagctcgatcaggcgcttgacagcctgcttgcgcagccgatggtgcagggcggcgtggtgctgagcacgtgcaaccgcacggaactttatcttagcgttgaagagcaggacaacctgcaagaggcgttaatccgctggctttgcgattatcacaatcttaatgaagaagatctgcgtaaaagcctctactggcatcaggataacgacgcggttagccatttaatgcgtgttgccagcggcctggatagtctggttctgggggagccgcagatcctcggtcaggttaaaaaagcgtttgccgatagccaaaaaggtcatatgaaggccagcgaactggaacgcatgttccagaaatctttctctgtcgcgaaacgcgttcgcactgaaacagatatcggtgccagcgctgtgtctgtcgcttttgcggcttgtacgctggcgcggcagatctttgaaagcctctctacggtcacagtgttgctggtaggcgcgggcgaaactatcgagctggtggcgcgtcatctgcgcgaacacaaagtacagaagatgattatcgccaaccgcactcgcgaacgtgcccaaattctggcagatgaagtcggcgcggaagtgattgccctgagtgatatcgacgaacgtctgcgcgaagccgatatcatcatcagttccaccgccagcccgttaccgattatcgggaaaggcatggtggagcgcgcattaaaaagccgtcgcaaccaaccaatgctgttggtggatattgccgttccgcgcgatgttgagccggaagttggcaaactggcgaatgcttatctttatagcgttgatgatctgcaaagcatcattagccacaacctggcgcagcgtaaagccgcagcggttgaggcggaaactattgtcgctcaggaaaccagcgaatttatggcgtggctgcgagcacaaagcgccagcgaaaccattcgcgagtatcgcagccaggcagagcaagttcgcgatgagttaaccgccaaagcgttagcggcccttgagcagggcggcgacgcgcaagccattatgcaggatctggcatggaaactgactaaccgcttgatccatgcgccaacgaaaagtcttcaacaggccgcccgtgacggggataacgaacgcctgaatattctgcgcgacagcctcgggctggagtaacagtacatcattttctttttttacagggtgcatttacgcctatgaagccttctatcgttgccaaactggaagccctgcatgaacgccatgaagaagttcaggcgttgctgggtgacgcgcaaactatcgccgaccaggaacgttttcgcgcattaagtcgcgaatatgcgcagttaagtgatgttagccgctgttttaccgactggcaacaggttcaggaagatatcgaaaccgcacagatgatgctcgatgatcctgaaatgcgtgagatggcgcaggatgaactgcgcgaagctaaagaaaaaagcgagcaactggaacagcaattacaggttctgttactgccaaaagatcctgatgacgaacgtaacgccttcctcgaagtccgagccggaaccggcggcgacgaagcggcgctgttcgcgggcgatctgttccgtatgtacagccgttatgccgaagcccgccgctggcgggtagaaatcatgagcgccagcgagggtgaacatggtggttataaagagatcatcgccaaaattagcggtgatggtgtgtatggtcgtctgaaatttgaatccggcggtcatcgcgtgcaacgtgttcctgctacggaaagccagggtcgtattcatacttctgcttgtaccgttgcggtaatgccagaactgcctgacgcagaactgccggacatcaacccagcagatttacgcattgatactttccgcagcagtggggcgggtggtcagcacgttaacaccaccgatagcgcaattcgtattactcacttgccgaccgggattgttgttgaatgtcaggacgaacgtagtcaacataaaaacaaagctaaagcactttctgttctcggtgctcgcatccacgctgctgaaatggcaaaacgccaacaggccgaagcgtctacccgtcgtaacctgctggggagtggcgatcgcagcgaccgtaaccgtacttacaacttcccgcaggggcgcgttaccgatcaccgcatcaacctgacgctctaccgcctggatgaagtgatggaaggtaagctggatatgctgattgaaccgattatccaggaacatcaggccgaccaactggcggcgttgtccgagcaggaataatggaatatcaacactggttacgtgaagcaataagccaacttcaggcgagcgaaagcccgcggcgtgatgctgaaatcctgctggagcatgttaccggcagagggcgtacttttattctcgcctttggtgaaacgcagctgactgacgaacaatgtcagcaacttgatgcgctactgacacgtcgtcgcgatggtgaacccattgctcatttaaccggggtgcgagaattctggagcttgccgttatttgttagcccagcgaccttaattccgcgcccggatacggagtgtctggtggagcaggcactggcgcggttgcctgaacaaccttgccgtattctcgatctcgggacgggtaccggggcgattgcgcttgcgctggctagcgagcgcccggactgcgaaattatcgctgtagatcgtatgcctgatgctgtctccctggcacaacgtaatgcccagcatctggcgatcaaaaatatccacattctgcaaagcgactggtttagcgcgctagccgggcagcagtttgcgatgattgtcagcaatccgccgtatattgacgagcaggaccctcatcttcaacaaggcgatgtccgctttgagccgctcactgcgctggttgcggcagacagtggaatggcagacatcgtgcatatcatcgaacagagccgtaacgcgctggtatccggcggctttctgcttctggaacatggctggcagcagggcgaagcggtgcgacaagcatttatcctcgcggggtatcatgacgtcgaaacctgccgtgactatggtgataacgagcgcgtaacgctcggccgctattatcaatgacaagtttttctacactgcttagtgttcatcttattagtatcgcgctttctgttgggctattaaccttacgtttctggctacgttatcagaagcatccacaggcatttgctcgctggacgcgcattgtgccgccggttgtcgatacgctgttactgttaagcggcattgcgttgatggctaaagcgcacatcctgccattttccgggcaggcacagtggctgactgaaaagctgtttggagttatcatttatatcgttttgggttttattgcactcgattatcgtcgtatgcacagtcagcaggcgcgcattattgccttcccgctggcgttggtggtgctgtacatcatcattaaactcgccaccacaaaagtaccgttactggggtaagtcatgagaagcttagctgatttcgaatttaataaagcgccattgtgcgaaggcatgatcctggcttgcgaagcaatccgccgcgattttcccagccaagatgtttacgacgaactggagcgtctcgttagtctggcgaaggaagaaatcagccagcttctgcctttagaagagcagttggaaaaactgatcgcgctgttttacggcgactggggatttaaagccagtcgcggtgtttatcgtctttccgatgcattatggctggaccaggtgttaaagaatcgacagggcagtgcggtaagtttaggtgcggttttattatgggtcgcgaatcgtctcgatttgccgctgctgccggtgattttccctacgcagctgatattgcgcattgaatgtccggatggcgaaatttggctgattaatccttttaacggtgaaagcttaagcgaacatatgctggacgtatggttaaagggaaatatcagcccgagcgcggaactgttttatgaagaccttgatgaagctgataacattgaggtaatccgcaaattgctggatacactcaaagccagcttgatggaagaaaatcagatggagctggcgttacgcaccagcgaagctttattacaattcaaccctgaagatccctatgaaattcgcgatcgcgggttgatttatgcgcaactggattgcgaacacgttgcgttgaacgatttaagttatttcgttgaacagtgtccggaagacccgatcagcgaaatgatccgtgcgcaaataaataacatcgcgcataaacatattgtgctgcattaattaatcgacattttactcaagattaaggcgatcctatgaaacaaaaagtggttagcattggcgacatcaacgtagcaaatgacctgccgttcgtactgtttggcggtatgaacgtgttggaatctcgcgatctggcgatgcgcatttgcgagcactacgtaactgtgacccagaaactgggtatcccttacgtgttcaaagcctcttttgacaaagccaaccgctcctccatccactcttatcgtggaccgggcctggaagaagggatgaaaatcttccaggagttgaagcagacttttggcgtgaaaattatcaccgacgttcacgaaccaagtcaggcacagcccgttgctgatgtcgtggatgtgattcagttgccggcgtttcttgctcgccagactgacctggttgaagccatggcgaaaaccggtgcggtaattaacgtcaagaaaccacagtttgtcagcccgggacagatgggtaatatcgttgataaattcaaagaaggcggcaacgaaaaagtgattctttgcgatcgcggtgctaacttcggctatgacaacctggttgtcgatatgctgggcttcagcattatgaagaaagtgtctggtaacagcccggtgattttcgacgtgacccacgcactgcaatgccgcgatccgtttggcgcagcttccggtggtcgtcgtgctcaggtggctgagctggcacgagccggtatggcggtaggtctggcggggctgtttattgaagcgcatccggatccggaacatgcgaaatgtgatggtccatccgcgctgccgctggctaaactggaaccgttcctcaagcagatgaaagcgattgatgatctggtgaaaggtttcgaagaactggataccagcaagtaatcttttttgcttgaaaaataaagtattagcgttctgcgttaagacttttttcatgggtgccggatacaaaaaaggccgcaggctgttacccctgcggccggtttcgggcgcatattgccatcacggcagcctgacgcccgttttcaccttacttccggttacgccaccagctgacaatcgctgcggtaataattcccgccaggatcggtgctgccaggtcgtgccagaaaatcatggcaaactgcgcgagcgtcatatagccgccttgttgtaatgacaacattttgcggctattcttgaattgttctggttcaagattagcccccgttctgttgtcaggttgtacctctcaacgtgcgggggttttctctttccagcaaccaatgccaccagggataaagcccccgcaacattgcgcctcaccggataacgccggcttggtgtggatactacgactcaattcatcttcacttcatccctgaaatgtttgcaatgaagagtgcattccggtttttcaacagctgttacagtcatttcatgagtgctctggatgaggcttccagctcgggttgccaatatttacttgtggaagtgataaagacaaaaatggccgcaggctgttacccctgcggccggtttcgggcgcatattgccatcacggcagcctgacgcccgttttcaccttacttccggttacgccaccagccgacaatcgctgcggtaataattcccgccaggatcggtgccgccaggtcgtgccagaaagtcatggcaaactgcgcgagcgtcatatagccgccttgttgtaatgacaacattttgcggctattcttgaagtgtctggtttcaagattagcccccgttctgttgtcaggttttacctctcaacgtgcgggggttttctctttccagcaaccaatgccaccagggataaagcccccgcaacattgcgcctcaccggataattccggcttggtgtggatactacgtctcaattcatcttcacttcatccctgaaatgtttgcaataaagagtacattccggcttttcaacagctgttgcagtcgtttcatgagtgctctggatgatgcttccagctcgggttgccaatatttacttgtggaagagataaagacaaaaatggccgcaggctgttacccctgcggccggtttcgggcgcatattgccatcacggcagcctgacgcccgttttcaccttacttccggttacgccaccagctgacaatcgctgcggtaataattcccgccaggatcggtgctgccaggtcgtgccagaaaatcatggcaaactgcgcgagcgtcatatagccgccttgttgtaatgacaacattttgcggctattcttgaagtgtctggtttcaagattagcccccgttttgttgtcaggttttacctctcaacgtgcgggggttttctctttccagcaaccaatgccaccagggataaagccccgcaacattgcgcctcaccggataacgccggcttggtgtggatactacgtcgcaattcatcttcacttcatccctgaaatgtttgcaatgaagagtacattccggcttttcaacagctgttgcagtggtttcgtgcagggtgtggtacaggctcgcaattctgattaacgacctgtccaggtagtatgaagaaatacaataagcaggaatttatattatctcccccgattaccgtcatcggaggagatataactgtcaggcaaatatcgtcatcaaataggcggcaaacagtgccagatgcgctgcgccattgagcatgttagtacgtccggtggagaaggagatatggcacagcactaaagaggccaccatcaccaccatttctggcgcaccaagtgcaaactgcaattcgttacccgtcataaaggcaattagcgtgacgacaggtacggtaaggctaatggttgctaacacactaccaaagaacagattcatcgcgcgctgaacctggttgttcaacactgcttttaatgcacctaaaccttccgggctcagaatcaacagtgccaccaggaagccagtaaaggcgacaggggcattcatgctgtcgagcaatgtctccaggctgctggcgttcattttggtcaccgcaataacggcaatcagatggataatcaaccagatagcatgccacaggctgctatgggcagacggtttaccgtgatgcgggtcgtcatcatcactgtcatcttcgtgctcgtagacaaacaaactttgatgcgttttggtctggatcagcaaaaatacgccatacattgccgcagaaattaatgctaccagtaacgcctgaccggtactaaaattcgccgcaggcagagccattggaaataccagtacgattatcgccagggggaacagcgcaattaaatactgcttgataccaaacagattcatatattgggtggcaaacttacgaccgcccaacaataaactaaagccaaccagcccaccggtaacaatcataatgatactatagagcgtatcacgcattagcgttggcgcggcgtcgccggttgccattaaagcactaatcaaactgacttcaagaataaccacactaaggctaagaataaggctaccgtaaggttctcccaggcgatgggctaatacgtccgcatgacggacaacactaaaggcgctacttaaaataccaataagcgcaagaagattgatggcaatgaccactggtagtgtctggctgcttccccacaggaacagcactaccagcgccagaaccgggaaaataaggctagtctccttgtggcgggtttttaccgcctcttgagcattactcattatggttatccctttgcagatgaatttatcgaaaatgtaaaaaataggtaggaaaaataacagaaagtgtctggatatcggtaacattttacgaatttttaccccgctgtcgattttttactcattggggcataaaaataagtattacgtttagacaatgtttgttttagcgtctcttaagaagagtctgacctgaaaattcttatgttttggcaagagtagatattgttgaccacacttaatgttcaactttgtaaaaggagtcaacgatgccgtataaaacgaaaagcgatctgccggaaagcgtaaagcacgttctaccgtctcatgcccaggatatctataaagaagcgttcaacagcgcatgggatcaatataaagataaagaagatcggcgtgatgacgccagtcgcgaagaaaccgcgcataaagtggcctgggctgctgtgaagcatgaatatgccaaaggggatgatgataaatggcataaaaaaagctaaaaccggtcgcttagttaaagctattcgtgcggtgttgccttgcaagtggtccgtggattgcatattgtcccgttagtggtttcaaaatgagcagtaaaaatgtccggaagacaccaaaaagttgtcgcagggaagtatgcagtggcggaagtgtaaggtgataacgcgtgatttcttgatgaatgccgattgtaaaacggcatttggtgccattgaagaaagtctcttatggagtgcagaacaacgggcggctagcctggcggcgacgctggcttgtcgacctgatgagggaccggtgtggatcttcggctatggaagcttgatgtggaatccggcactggagtttaccgaaagctgcaccggtacactggttggatggcatcgcgcattttgcctgcgcctgaccgccgggcgcgggactgcgcaccagccgggacggatgcttgcactgaaagagggcggacgcaccacaggcgtcgcctatcgactgccagaagagacgctggagcaggaactaaccctgttgtggaagcgagagatgattaccggctgttatctgccaacctggtgtcagcttgatcttgatgatggacgcacagtaaacgccattgtgtttattatggacccgcgacatccagaatatgaatctgatactcgcgctcaggtcatcgcgccgttgattgcggcggcgagcggtccgctgggaaccaacgcacaatacctgtttagtctggaacaggagcttatcaaactgggaatgcaggacgatgggctgaatgatttgctggtaagcgtaaaaaaactgctggcggagaattttccggatggtgtgttacgtccgggattcgcctgagtaaacttcccgcatagtggggcgtcagacgccccctcaaacattaaaatgtgagcactttatcggcactcagcgtccattgcgccagttccacaagagtaccgatttccaccccatcaatcagaggaagtgtactaatcccgcgcccgtcggtacaggttttgcacaatttcaccggtacattctgagcggtaaggatctccagcatttgctgaatgttgtagccttcccctggtttttgcccgcgcaacccggctgtgaccgcatcagacatgaggaacagacgcagatccagattgctctcctgctctcgtaacgcaatggccagccgcaagctgttaaacaaggattcgctcccgtaaggtgcgccattggcaacgatcacgattttttgcattatttactcctgtattcagggaattagacactcatcttctatcttactgcttctgcagcgtctgaccaatcggtcacatttttaaggattttcctgaaagcgcgagaaaatacgacaaaagttgccagtaatcgttattctttaaggctatggtttttcattattaccggaagttaccgacgttttgagccgtttcgttcctcgcattatcccgttttatttactcttgcttgtagcaggcggtacagctaacgcacaatctaccttcgagcaaaaagcggcaaatccctttgataataacaatgatggtctgccggatttaggcatggctcccgaaaatcatgatggggaaaaacactttgctgaaattgtgaaagatttcggcgaaaccagtatgaatgataacgggctggatactggcgagcaggcaaaagctttcgcattgggaaaagtccgcgacgcgcttagtcaacaggttaatcagcacgtagagtcctggctaagtccgtggggaaatgccagtgttgacgtcaaagtggataacgaaggacatttcaccggcagtcgtggaagctggtttgtgccgttacaagataatgatcgttatctcacctggagccagcttggtcttactcagcaggataatgggttggtgagcaatgtgggcgttgggcaacgctgggcgcgcggcaactggctggtgggttataacactttttatgacaacttgctggacgaaaatcttcagcgagcgggctttggtgccgaagcgtggggcgaatatttgcgattaagcacaaacttttatcagccgtttgctgcatggcatgaacagacagccacgcaggaacaacggatggcgcgcgggtacgacctgacagctcggatgcgcatgccgttctatcaacacctcaataccagtgtcagcctagaacagtattttggtgatcgtgttgatttgtttaactctggtacgggttatcacaatcccgtcgcgttgagtctgggattaaattacacccctgtgccattagtcactgtgacggcccagcataaacagggtgaaagtggcgaaaatcaaaataacctcgggctgaatcttaattaccgctttggtgtaccgctcaaaaaacaactttctgcgggcgaggttgccgaaagtcagagcttacgtggtagtcgctatgacaatccgcagcgaaataatctaccgactcttgagtaccgacagcgaaaaacgttaacggtgtttctggcgacaccgccgtgggatctaaaacctggcgaaacagtgccgctgaaattacaaatccgcagtcgttacggtattcggcaactgatttggcagggcgatacgcagatattaagtttgacgccgggcgcacaagccaacagcgcggagggctggacgctgatcatgcctgactggcagaacggggaaggggcaagcaatcactggcgattgtctgtggtggtggaagataaccaggggcagcgtgtctcctccaatgagatcacgctaacgcttgtcgaaccgttcgatgcattgagtaacgacgaactgcgctgggaaccgtaatcagaaaatgcgctcctgatgcacccataccgctgcttccacgcgagacttgagcttcattttcttcagcatgtgcttgacgtgcacttttactgtgctttcggtgatatccaggcggcgggcaatcatcttgttcggcaaaccctgggcaatcagcttgagaatatcgcgctcgcgtggggttaactggttaacatcgcgctcagtagtggcacggttagcgcgcaagctggcggccagaacaggcgttaatgcttcgcttaataccatttcgccagcagctgcctgatgcaatgctttcagcagatcttccggttccatatcttttaacagatagccatccgcgccgcgtttcagtgcggtgaccacatcttcttcatggttagagacgctgaataccacaatgcgcccactgagggacttttcgcgcagtttatccagcgtttccagaccgttcatgccgggcatattgagatctaacaggatcagatcgggatcaagagactccgccagttcaataccctgttcgccattactcgcttcgccaaccacggtgatatctggtgccatactgataagctgttttacgccagttcgcagcatcgggtgatcgtcaatcagcaggatagtagccggttcctgattactcatgggtatctccttggacgtctgtgaaagttttttcgggaataaaggtgaccaccacttcggtgccaccactttcacgacggcggacgcggcaatcgcctcgtaaactttgcgcacgatcgcgcattattatcatgccgtagtgattgctgcggatggcattttcaggcacgccgcagccgttatcctggacggtcagtttgacctgattatcgttttgcgccaccgtcaccacgacttcactcgcttggctatgtttgagggcgttacttaatgcctcacgggcaatttgcaacaagtggattgcctgatggctaggcaccaggcgaggcggcaattgataatccagcttcaccgggaagccaaatttggcgctgtactcttcgcaactcgcctccagcgccggacgtaatccaggctcggtgagctgcaagcggaatgtggtgagcaattcacgcaactgcgcccaggatgcattcagttcgttacggatctgacttaacagttcgcggctgctttctggcagcgcatcgccctgcatctgtaaacaactcacctgcatcttcatgcaagagagagattgggcaatagaatcatgcagttcgcgcgcaatggtggcacgctcttccatcacgatcaactgttgctgacgttcctgatggcgatccagcgccagcgtggcggtgagttgttcaaccagggtatccaccagttgttgttgatcatggctaagatgacgcccctgcggcagggtcgccagcaaaataccgtactgcgtatgagagtcagccagccgccacttcagggtcgtgccgcgatcaccaacgggtaatacgccgcgcgggcagagctggcagcctttatcatcacaagtcatatctggctggcaggtaaactcctgatgattctcttcatcatcagtgtcatacacccgcaattcgatatcacgtagcagggttaaattctgtaagccgttgagtacaggactcaggcgttcacacagcggggcgcgggaatgcaaacggcggttagcctgccataaaaaagagaggatctgatttttatgctccagcccggcggttttctcctgaacccgctgctcaagtacggcataactttcggccagttctgcagacatattgttcaacgcagttccaagcatcgccatttcgttgcgcccgctgatgtttgcgcgttgggtaaaatcgcgatgactgacggcactcgccattgccagcagttgccgccacggttgtagcagtcgcgcccgcaaccagataatagtgaacaccagtaaaagtgccataaataccgccattacccgatggaccagtaccactgtctcgatgcgcatttccgtggtgcggtcaaaaccagataccagttgatcaagcccggcaacaaactggctgacatccgcactcaccgtttctcggttttgtgcacgcatcagcgcagggatcagttcattacgccagtaatcttgtaaaccctgtaattgcgccagttgtccgtctcgttctgctgctcgagtcaactcggcgctaaatgccgtttgttccatctctttaattaagggcttgtctttctcgcttaatggcactgccgccaacagacggtaactttgcatgcgcaggcttcccgctttgttgatcgcatgggcgctgccctgaacgccttgcaccagccagccagaaaccgccatccctgccagtccaatagcagtagaaagcaacacaataagcgcaacctgattaaccagggtgagcggagagagacaacgtttaagcatgtaaacctcttccttcaggctttaaatgagcaataaccttaatgaatgtgacgatacattctggaatggcagtattctcggctattggctgaagtatacccatacccggaaagagttactccttatttgccgtgtggttagtcgctttacatcggtaagggtagggattttacagcaccgtgaaaaatctcataatttttatgaagtcactgtactcactatgggtaatgataaatatcaatgatagataaagttatcttatcgtttgatttacatcaaattgcctttagctacagacactaaggtggcagacatcgaaacgagtatcagaggtgtctatgagtcacagttccgcccccgaaagggctactggagctgtcattacagattggcgaccggaagatcctgcgttctggcaacaacgcggtcaacgtattgccagccgcaacctgtggatttccgttccctgtctgctgctggcgttttgcgtatggatgttgttcagcgctgttgcggtgaacctaccgaaagtcggctttaattttacgaccgatcagctatttatgttgactgcgctgcctagcgtttctggcgcgttattacgtgttccatactcctttatggttcctatcttcggtggtcgtcgctggacggcgttcagcaccggtattctgattattccttgcgtctggctgggttttgccgtgcaggatacctccacgccttatagcgtcttcatcatcatctctctgctatgcggctttgctggcgcgaacttcgcatccagtatggcaaacatcagcttcttctttccgaaacagaagcagggtggcgcgctgggtctgaatggtggtctgggaaacatgggcgtcagcgtcatgcagttggttgctccgctggtggtaagtctgagcattttcgcagtatttggtagccagggcgtcaaacagccggatgggactgagctgtatctggcgaatgcgtcctggatatgggtgccgttccttgccatcttcaccattgcggcgtggtttggcatgaacgatcttgctaccagcaaagcctccatcaaggagcagttgccggtactcaaacggggtcatctgtggattatgagcctgctgtatctggcaaccttcggctccttcatcggcttctccgcgggctttgcaatgctgagtaaaacgcagttcccggatgttcagattctgcaatacgctttcttcgggccgtttattggtgcgctggcgcgttctgcaggtggtgcattatctgaccgtctgggcggaactcgtgtcacgctggtgaactttattctgatggcgattttcagcggcctgctgttcctgaccttaccgactgacgggcagggcggaagcttcatggcgttcttcgcggtcttcctggcgctgttcctgacagctgggctgggtagtggttccactttccagatgattagtgtgatcttccgtaaactgacaatggatcgcgtgaaagcagaagggggttctgacgaacgtgcgatgcgtgaagcggcaaccgacacggcggcggcgctgggtttcatctctgcgattggcgcgattggtggcttctttatcccgaaagcgtttggtagcagcctggcattaacgggtagcccagtcggcgcaatgaaggtatttttgattttctatatcgcctgcgtagtgattacctgggcggtatatggtcggcattctaaaaaataaaccgttactcgtcatacttcgggttacatgtgctgcggctgcgttcattcaccccagtcacttactttagtaagctcctgggattcattcacttgccgccttcctgtaaaccgaattatatagagtaaaatatttgattatcctttgcgcggcatgatgtcgcgctttttttatgcgtcatttagttacaacatactaatgttatatggtttatttcgccggatttcattaagagccattaatatgttacccatggggaatactccttaatacccatctgcataaaaatcttaatagtttaaataactacaggtataaaacgtcttaatttacagtctgttatgtggtggctgttaattatcctaaaggggtatcttaggaatttactttatttttcatccccatcactcttgatcgttatcaattcccacgctgtttcagagcgttaccttgcccttaaacattagcaatgtcgatttatcagagggccgacaggctcccacaggagaaaaccgatgagtaaattcctggaccggtttcgctacttcaaacagaagggtgaaacctttgccgatgggcatggccagcttctcaataccaaccgtgactgggaggatggatatcgccagcgttggcagcatgacaaaatcgtccgctctacccacggggtaaactgcaccggctcctgcagctggaaaatctacgtcaaaaacggtctggtcacctgggaaacccagcagactgactatccgcgtacccgtccggatctgccaaaccatgaacctcgcggctgcccgcgcggtgccagctactcctggtatctttacagtgccaaccgcctgaaatacccgatgatgcgcaaacgcctgatgaaaatgtggcgtgaagcgaaggcgctgcatagcgatccggttgaggcatgggcttctatcattgaagacgccgataaagcgaaaagctttaagcaggcgcgtggacgcggtggatttgttcgttcttcctggcaggaggtgaacgaactgatcgccgcatctaacgtttacaccatcaaaaactacggcccggaccgtgttgctggtttcagcccaattccggcaatgagcatggtttcttacgcaagcggtgcacgctatctcagcctgattggcggtacttgcttaagcttctacgactggtactgcgacttgcctcctgcgtctccgcaaacctggggcgagcaaactgacgtaccggaatctgctgactggtacaactccagctacatcatcgcctgggggagtaacgtgccgcagacgcgtaccccggatgctcacttctttactgaagtgcgttacaaagggaccaaaactgttgccgtcacaccagactacgctgaaatcgccaaactgtgcgatctgtggctggcaccgaaacagggcaccgatgcggcaatggcgctggcgatgggccacgtaatgctgcgtgaattccacctcgacaacccaagccagtatttcaccgactatgtgcgtcgctacaccgacatgccgatgctggtgatgctggaagaacgcgacggttactacgctgcaggtcgtatgctgcgcgctgctgatctggttgatgcgctgggccaggaaaacaatccggaatggaaaactgtcgcctttaataccaatggcgaaatggttgcgccgaacggttctattggcttccgctggggcgagaagggcaaatggaatcttgagcagcgcgacggcaaaactggcgaagaaaccgagctgcaactgagcctgctgggtagccaggatgagatcgctgaggtaggcttcccgtactttggtggcgacggcacggaacacttcaacaaagtggaactggaaaacgtgctgctgcacaaactgccggtgaaacgcctgcaactggctgatggcagcaccgccctggtgaccaccgtttatgatctgacgctggcaaactacggtctggaacgtggcctgaacgacgttaactgtgcaaccagctatgacgatgtgaaagcttataccccggcctgggccgagcagattaccggcgtttctcgcagccagattattcgcatcgcccgtgaatttgccgataacgctgataaaacgcacggtcgtagcatgattatcgtcggtgcggggctgaaccactggtatcacctcgatatgaactatcgtggtctgatcaacatgctgattttctgcggctgtgtcggtcagagcgggggcggctgggcgcactatgtaggtcaggaaaaactgcgtccgcaaaccggctggcagccgctggcgtttgcccttgactggcagcgtccggcgcgtcacatgaacagcacttcttatttctataaccactccagccagtggcgttatgaaaccgtcacggcggaagagttgctgagtccgatggcggacaaatcccgctataccggacacttgatcgactttaacgtccgtgcggaacgcatgggctggctgccgtctgcaccgcagttaggcactaacccgctgactatcgctggcgaagcggaaaaagccgggatgaatccggtggactatacggtgaaatccctgaaagagggttccatccgttttgcggcagaacaaccagaaaacggtaaaaaccacccgcgcaacctgttcatctggcgttctaacctgctcggttcttccggtaaaggtcatgagtttatgctcaagtacctgctggggacggagcacggtatccagggtaaagatctggggcaacagggcggcgtgaagccggaagaagtggactggcaggacaatggtctggaaggcaagctggatctggtggttacgctggacttccgtctgagcagcacctgtctctattccgacatcattttgccgacggcgacctggtacgaaaaagacgacatgaatactagcgatatgcatccgtttattcacccgctgtctgcggcggtcgatccggcctgggaagcgaaaagcgactgggaaatctacaaagccatcgcgaagaaattctccgaagtgtgcgtcggccatctgggtaaagaaaccgacatcgtcacgctgcctatccagcatgactctgccgctgaactggcgcagccgctggatgtgaaagactggaaaaaaggcgagtgcgacctgatcccaggtaaaaccgcgccacacattatggtcgtagagcgcgattatccggcgacttacgaacgctttacctctatcggcccgctgatggagaaaatcggtaatggcggtaaagggattgcctggaacacccagagcgagatggatctgctgcgtaagctcaactacaccaaagcggaaggtccggcgaaaggccagccgatgctgaacaccgcaattgatgcggcagagatgatcctgacactggcaccggaaaccaacggtcaggtagccgtgaaagcctgggctgccctgagcgaatttaccggtcgtgaccatacgcatctggcgctgaataaagaagacgagaagatccgcttccgcgatattcaggcacagccgcgcaaaattatctccagcccgacctggtctggtctggaagatgaacacgtttcttacaacgccggttacaccaacgttcacgagctgatcccatggcgtacgctctctggtcgtcagcaactgtatcaggatcaccagtggatgcgtgatttcggtgaaagcctgctggtttatcgtccgccgatcgacacccgtagcgtgaaagaagtgataggccagaaatccaacggcaaccaggaaaaagcgctcaacttcctgacgccgcaccagaagtggggtatccactccacctacagcgacaacctgctgatgctgactttaggtcgcggtggtccggtggtctggttgagtgaagccgatgccaaagatctgggtatcgccgataacgactggattgaagtcttcaacagcaacggtgctctgactgcccgtgcggttgtcagccagcgtgttccggcagggatgaccatgatgtaccacgcgcaggaacgtatcgttaacctgcctggtagcgaaattacccaacagcgtggtggtatccataacagcgtcacccgtatcacgccgaaaccgacgcatatgatcggcggctatgcccatctggcatacggctttaactactatggcaccgtaggttctaaccgcgatgagtttgttgtagtgcgtaagatgaagaacattgactggttagatggcgaaggcaatgaccaggtacaggagagcgtaaaatgaaaattcgtagtcaagtcggcatggtgctgaatctcgataagtgcatcggctgccacacctgtagtgttacctgtaaaaacgtctggaccagccgtgaaggcgtggaatatgcgtggttcaacaacgtggaaaccaagccgggccagggcttcccgactgactgggaaaaccaggaaaaatacaaaggcggctggatccgtaaaatcaacggcaaactgcagccgcgcatgggtaaccgtgccatgctgctgggtaaaatcttcgctaacccgcatctgccggggatcgacgattattacgagccgttcgattttgactatcagaacctgcataccgcgccggaaggcagcaaaagccagccgattgcccgtccgcgtagcctgattaccggggaacggatggcgaaaatcgaaaaagggccgaactgggaagatgacctgggcggtgagtttgacaaactggcgaaagacaagaacttcgacaacatccagaaggcgatgtatagccagttcgaaaacaccttcatgatgtatttgccgcgcctgtgcgaacactgcctgaacccggcatgtgtggcgacctgcccgagcggtgcgatttacaagcgtgaagaagatggcatcgtcctgatcgaccaggataaatgccgtggctggcgtatgtgcatcactggatgcccgtacaaaaaaatctacttcaactggaagagcggtaagtctgagaagtgcatcttctgctatccgcgtattgaagcgggtcagccgaccgtgtgcagtgaaacctgtgtcggtcgtatccgttatcttggcgtgctgttgtacgatgccgacgctattgaacgtgcagccagcaccgagaacgagaaagatctttaccagcgtcagctggacgtgttcctcgatccgaacgatccgaaagtcatcgagcaggcgattaaagacggtattccgctgagcgttattgaagccgcacagcagagcccggtttataaaatggcaatggaatggaaactggcgctgccgctgcatccggaatatcgcacactgccgatggtctggtacgtgccgcctctgtctccgattcagtctgcagcagacgcgggtgagctgggtagcaacggcattctgccagacgtcgaaagcctgcgtattccggtacagtatctggcgaatctgctgaccgccggtgataccaaaccggtactgcgcgcactgaaacgtatgctggcgatgcgtcattacaaacgtgctgaaaccgttgacggtaaagttgatacccgtgcgctggaagaggtcggtctgaccgaagcccaggcacaggagatgtaccgttatctggcgattgctaactacgaagatcgctttgtggtgccgagtagtcatcgtgaactggcacgggaagccttcccggagaaaaatggctgcggctttacctttggtgatggctgccacggtagtgataccaaattcaatctgttcaacagccgtcgtatcgatgccatcgatgtgaccagcaaaacggagccgcatccatgatcgaactcgtgattgtaagccgtctccttgaatatccggatgctgccttatggcagcatcaacaagagatgtttgaggcgattgccgcgagcaaaaatctgccaaaagaggatgcccatgcgctgggcattttcctgcgcgatttaacgacgatggatccgctcgatgcccaggcgcagtacagcgaactgttcgaccgtggccgcgccacgagtctgttgctgtttgaacatgtgcacggcgaatcccgcgaccgcggccaggcgatggtggacctgctggcgcagtacgagcagcacggcttgcagttaaacagccgcgaattgccggaccatctgccgctgtatctggagtacctggcgcagctgccgcaaagcgaagccgtggaaggtttgaaagatatcgcgccgattctggcattgctgagcgcgcgtctgcaacagcgtgaaagccgttatgccgtgctgtttgatctgctgctgaaactggcgaataccgctatcgacagcgacaaagtggcggaaaaaattgccgacgaagcgcgcgatgatacgccgcaggcgctggatgctgtctgggaagaagagcaggttaaattctttgctgacaaaggctgcggtgatagtgcaatcactgcgcatcagcgtcgctttgccggtgccgtcgcgccgcaatatctgaatatcaccaccggaggacagcactaatgcaattcctgaatatgttcttctttgatatctacccgtacatagccggggcggtcttcctgattggtagctggctgcgttatgactacgggcagtacacctggcgcgcggcgtccagccagatgctggatcgcaaagggatgaacctggcgagcaacctgttccatatcgggattctggggatttttgtcggtcacttcttcggtatgctgacgccgcactggatgtatgaagcctggctgccgattgaagtgaaacagaaaatggcaatgtttgctggtggtgccagcggcgtgctgtgtctgattggcggcgtgctgttgctgaaacgtcgtctgttcagcccacgcgtgcgtgcaaccactaccggagcggatatcctgatcctgagcctgctcgttatccagtgcgcgctgggcctgttgaccattccgttctccgctcagcatatggacggtagcgagatgatgaaactggttggctgggcgcagagcgtggtgaccttccacggtggcgcttctcaacacctcgatggtgtggcgtttatcttccgtctgcacctggtgctggggatgacgttattcctgctgttcccgttcagccgtctgatacacatctggagcgtaccggtggagtatctgacacgtaagtaccagctggtgcgcgctcgtcactaagcgaattttagttcacatagaccctgcttcggcggggtttttttatgggcacggtgcggggtgagttgtcggatgcgcttcgcttatccgacctacaggggaggatattgtaggcccggtaaacgtggtgccatcgggcaaaattagctcggagtaacaggttttgattatttaaggaagcgatggtggtgggggaaggattactcagcgctgcgcgcttcgcccttcgggtcgttgcctgcggcaacgctctcagcctggcgctcaagagcaaccttggtcgaagcttcagttccttccccgcttgggcagaatatttgattgcggatagctttgagaattccggggcttttgaaagtgatggtggtgggggaaggattactcagcgctgcgcgcttcgccctagcggtcgttgcctgcggcaacgctctctcgctgacgctcgagccgaaccttaatcgaagcttctcatccttccccgcatgggcagaatatttgattgcggattcgcttgagagttcagggacttttgaaagtgatggtggtgggggaaggattactcagcgctgcgcgcttcgcccttcgggtcgttgcctgcggcaacgctctctcgctggcgctcgagtgctaccttggtcgaagcttctcatccttccccgcatgggcagaatatttaattgcggattcgttgggaagttcagggacttttgaaagtgatggtggtgggggaaggattcgaaccttcgaagtcgatgacggcagatttacagtctgctccctttggccgctcgggaaccccaccaggggtaattcaaattttgaggtaatgcttgagatggtggtgggggaaggattattcgtcgcttcgctcctcacccttcgggccgttgcctgtggcaacgttctctcgctttcgctcgaatcgaaccttagtcgaaggttctcacccttccccgatgagtgcaaactttcacaatctcaccgaagttaccacatcgctgtggtgaattatggtggtgggggaaggattcgaaccttcgaagtcgatgacggcagatttacagtctgctccctttggccgctcgggaaccccaccacggggtaatgctttttactggcctgctcccttatcgggaagcggggcgcatcatatcaaatgacgcgccgctgtaaagtgttacgttgagaaaaatgaactggttgcgtaattttcatccgtaacggattaaaggtaaccagttatttttgctggcgattaaagaataatcgttcgattaccgtaaacaaagacgcgctgtgccagtactttgtatagtgcacgacttaagacgtttttctcgacgtcacgacctgcgcgcatcatatcttcagctgtgtaggtatgatcgacatgaataacgtcctgcatgatgattgggccttcgtccagattgtcattcacatagtgagcggttgcgccaataatcttcacaccacgttcataggcctggtgataaggacgtgcgccaataaacgctggcaggaaactatggtgaatattgatgatcttattcgggaagcgtgccacaaattccggcgttaatacccgcatatacttcgccagcaccacgtagtcaggttgataagcatcaatggcatccgccatcttttgatcgtgctcgttgcgggttaacccttcatggcttaccagctcaaacggaatatcaaaacgctcaaccagagaacgtaaagtatcgtggttaccaataactgccgcgatttcgacatccaggccgccgtaattggctttcatcaacaaatcgccaaggcaatgcgcttctttagtgaccagaatcactatccggcgacgaccggcaggattcagctcacgcacggagccttctggcaatgcgctatcgagatccgccagcagggtggaatcattaaaaatcccttccagttccgtgcgcataaaaaagcgcccggtacggtgatcaacaaattcattgttctgtacgatatttaactcgtgcttgtagcaaatattggtaatacgtgcgatcagacctttttggtccggacaaatagtacgcagaactttacgttggagactatgcattgctggaaaaaccttgttgagagtgtttgctaaaccgtaccgtcaaccattattggccgcagcactttttaaattttttaccactaccacaagggcagggatcgttgcgaccaaactgcggacgtgtaccgtcaatatagtaccattgaccgttttctttcaaaaatcggctacgttcaattattgcacctgttttaccaccttcggtaaatcgagcaacaaaactgacaaatccgatattgtcggcgtcctgccaacaatgttcaaatacggtcaatcccaaccattcagtatgcgcaaatccggccatcaattcggcacgtaacgccgctgctccacaagagggatgccaggtctttattaaataatctgcgtcttgcatcacaaaagcgcagtaacggctacgcatgagatgttctggatcaggtgcaaccttttcaccagacacataagggtggcaacataggctatactcgacagcactaccacagggacaaagctgagacacaaataatctccctggaaacaataacggcgtattaaccgcctgagtagcactatgttaaccgagcagtagcgatgtggctacgattgcattccaggggaatcttgcgggaataatgagaaagataaaaatagggctggcgctgggatctggcgcggcgagaggttggagccatattggcgttattaatgcgctaaaaaaagtgggtattgaaattgatatcgttgcaggatgtagtattggtagcctggtgggcgctgcctatgcatgcgatcgattatctgcgctggaagattgggtgacctctttcagttattgggatgttttacgcctgatggatctctcctggcagcgcggtgggttactgcgcggcgagcgtgtcttcaatcaataccgcgaaataatgccggaaacagagatcgaaaattgttcccgtcgctttgcggctgttgccaccaatttaagtacgggacgtgaattatggtttactgaaggcgatctccatcttgctattcgcgcaagttgcagtattccaggactcatggcacctgttgcacataacggctactggctggttgatggagcagtcgttaacccaattcctatttccctcacgcgtgcattgggggctgatattgtgatagcggttgacctgcagcacgatgctcatttgatgcaacaagatttgctctcctttaatgtcagtgaagaaaatagcgagaatggtgattctctgccgtggcatgcgcgtctgaaagaaaggttaggcagcataacgacacgtcgggcggtgacagcgccaacggcaacagagattatgaccacttctatccaggtgctggagaaccgccttaaaaggaaccgcatggcaggtgatccgcccgatattctgattcaacctgtttgcccgcaaatatctacgcttgatttccatcgcgcgcacgctgccattgcggccggacagctggcagtggaaaggaaaatggacgaacttttgccgttggtacgcaccaacatttgaccagaatttttatctacacttaagttaattctgacaggcgcaggtggcaatagcatgccactattgagtaaagccagtcaggggagagaacatgacgcagccattggtcggaaaacagattctcattgttgaagatgagcaggtatttcgcagccttctggatagttggttttccagtttgggagcgacaacggtactggcggctgatggggtggatgcccttgagttgctgggaggtttcactccagacctgatgatatgtgatatcgcgatgccacgaatgaacgggcttaaactgctggagcatatacgtaacagaggcgaccagaccccagttctggtgatatctgccactgaaaatatggcagatattgccaaagcgttacgtctgggcgttgaagatgttttgctgaaaccagttaaagatctgaatcgcttgcgcgagatggtttttgcctgtctctatcccagcatgtttaatagccgcgttgaggaagaggaaaggctttttcgcgactgggatgcaatggttgataaccctgccgcagcggcgaaattattacaggaactacaaccgccggttcagcaggtgatttcccattgccgggttaattatcgtcaattggttgccgcggacaaacccggcctggtgcttgatattgccgcacttagcgaaaacgatctggcattttattgccttgatgtcacccgagctggacataatggcgtacttgctgccttgttattacgcgcattgtttaacggattattacaggaacagcttgcacaccaaaatcaacggttgccagagttgggcgcgttattgaagcaggtaaaccatttacttcgtcaggccaatctgccggggcagtttccgctattagttggctattatcatcgcgaactgaaaaatctcattctggtttctgcgggtctgaatgcgacgttaaataccggcgaacaccaggtgcaaatcagtaatggtgttccgttaggcactttaggtaacgcttatttgaatcaattgagccagcgatgcgatgcctggcaatgccaaatatggggaaccggtggtcgactgcgcttgatgttgtctgcagaatgagcaaacgataacgcgggctaaatttgcattacctgctaatgtcggctggtggtactatcgtcgccattcgtataagtaattgtcttaattatgctaactcgcctccttttcagaacttagccccttcggggtgctgatatactgggatgcgatacagaaatatgaacacgttcaaaacacgaacagtccaggagaatttaaatggctgccattaatacgaaagtcaaaaaagccgttatccccgttgcgggattaggaaccaggatgttgccggcgacgaaagccatcccgaaagagatgctgccacttgtcgataagccattaattcaatacgtcgtgaatgaatgtattgcggctggcattactgaaattgtgctggttacacacagttctaaaaactctattgaaaaccactttgataccagttttgaactggaagcaatgctggaaaaacgtgtaaaacgtcaactgcttgatgaagtgcagtctatttgtccaccgcacgtgactattatgcaagttcgtcagggtctggcgaaaggcctgggacacgcggtattgtgtgctcacccggtagtgggtgatgaaccggtagctgttattttgcctgatgttattctggatgaatatgaatccgatttgagtcaggataacctggcagagatgatccgccgctttgatgaaacgggtcatagccagatcatggttgaaccggttgctgatgtgaccgcatatggcgttgtggattgcaaaggcgttgaattagcgccgggtgaaagcgtaccgatggttggtgtggtagaaaaaccgaaagcggatgttgcgccgtctaatctcgctattgtgggtcgttacgtacttagcgcggatatttggccgttgctggcaaaaacccctccgggagctggtgatgaaattcagctcaccgacgcaattgatatgctgatcgaaaaagaaacggtggaagcctatcatatgaaagggaagagccatgactgcggtaataaattaggttacatgcaggccttcgttgaatacggtattcgtcataacacccttggcacggaatttaaagcctggcttgaagaagagatgggcattaagaagtaacatccgtatcggtgttatccacgaaacggcgttgagcaatcgacgccgtttttttatagcttattcttattaaattgtcttaaaccggacaataaaaaatcccgccgctggcgggattttaagcaagtgcaatctacaaaagattattgcttgatcaggaaatcgtcgagggatttaccttgctcatccattgcttttttgattacagctggagtacggccttggccagtccaggttttagtttcgccgttttcgtcaacgtagctatattttgccggacgctgagcacgtttagctttggtgccagatttaacggcagcaaggctattcagcagttcgttcgggtcaataccgtcagcgatcagcatttcgcgatattgctgcagtttacgagtgcgctcttcaacttcagcagcagccgcgctttcttcttcgcgacgttcgttaacaacaacttctaatttttccagcatttcttccagcgtttcaagtgtacattctcttgcctgcgcacgaagagtacggatgttgttcagaattttaagtgcttcgctcattgtagtaatctcaaacttatattggggtggtttgttgaggtaataatagagccttaaattcagttgtgcaatagccaggaatgtaaggaattcaaaattgttctttattttgtgccgccaataaatatcttttcataaaattagccagaaaagacgcggcatatagccctatttacaccgatgatttcgcagcacgtgaggttaaaacttcctgattcatgtcacattttatggggagattatcgtaggctgacgacctttcagtcttctgtattagttgtgtttacgagaattccctattaagcgaatgatgaaaagtagaacagtcgcaataagagcatggacttagtattgcactatctcctggaggtcaacagagggctattacttgcgcaacaggttaaagattgtgaatagttaccagcagtcatttacccgcttataacaagcgaggcagttgtaatgatagctcagaaggattatgcaaggcttcgtaagggagaacgcatatacccacttctgtgcatactgttgagctgaaaaactgacgaattatgataaactccagccaactttatttcatatcattgagggcctgtggctgatggcacagctatatttctactattccgcaatgaatgcgggtaagtctacagcattgttgcaatctagttacaattaccaggaacgcggcatgcgcactgtcgtatatacggcagaaattgatgatcgctttggtgccgggaaagtcagtagccgtataggtttgagtagccctgcaaaattatttaaccaaaatagtagtttatttgatgagattcgtgcggaacatgaacagcaggcaattcattgcgtactggttgatgaatgccagtttttaaccagacaacaagtatatgaattaagcgaggttgtcgatcaactcgatatacccgtactttgttatggtttacgtaccgattttcgaggtgaattatttattggcagccaatacttactggcatggtccgacaaactggttgaattaaaaaccatctgtttttgtggccgtaaagcaagcatggtgctgcgtcttgatcaagcaggcagaccttataacgaaggtgagcaggtggtaattggtggtaatgaacgatacgtttctgtatgccgtaaacactataaagaggcgttacaagtcgacagtttaacggctattcaggaaaggcatcgccacgattaataagaatttctttactgacagggtgagcagggcacttttatcctgtcagttcgttttacgcacttcttccgggctatatacccttctcggcagttttttaacgccgctatacgcctcacagggctcttaagcaccgacgttgacttgtgacctgtaaagtacaatatccctgtgtttaggcgttatacatcgtcgcaaatatgatgaaggctaatgctgtcggtttatggaaaagttgctttgggtaaacaaaaaatacggccccagaagggcaatgccgttcacttaagaggagcggcactatgtttcacaggataacgggtttttgatatcttaaccgacctcggccttgatggtcgggggcgttttgttatgaacaccacttccagagcaccccgaagatgctccagtcgtttcgggatggtccctggtgacgccgtgtttcccagctctatcatttctgatgcgatattcttccacgcaggcagtagccagtggcggttacaacccttctggttcagcgtcagcagcaggtcttcgctgtaaaaaagtttatcaaacaacgtaatagagttatccgggatggtggcgagcatggagtgggccagcacagtttcgctctgccggtaaggtgcggtcacggcattcagcagaatgtgacttcccaggttcattaaggccaccagacgcataaccgggtaggcgttctgccgcttagtggatgtgttggcagacccataatattcacgcagctcgggtttatcaggtgtcctgaactgtgcgccatcaatggcaaaaagttgcaggccgtgccagtcatccttcaggtaacgttccgcgcccctgtctgtgcggtctggcggaagagccattccactggggcggcccccacgcgctgacgcgcctgggtgacagcgctgcgggccagcaggttcatccccgcttcgccatccgcgctcaggttcagacggcgaacaacatcggtaattggctcattgcaccaccatccagataaccatgtcccccggtaaacgacggcggcgaacggtcgcatgagcagaaagcgtcaggcagtgttgtatccactcggtgggaaggtgttctgcaaatagttgtgcagagggcggaggcataagcggatggtcactgaaatcgagcagatcattgagaagtggcataagaaaacggctccctgttgtggaagccgttatagtgcctcagtttaaggatcggtcaactaatccttaactgatcggcattgcccagaaggggccgtttatgttgccagacagcgctactgattaagcggattttttcgcttttttctcagctttagccggagcagcttctttcttcgctgcagtttcaccttctacataatcacgaccgtagtaggtatccagcagaatctgtttcagctcggagatcagcgggtaacgcgggttagcgccggtgcactggtcatcgaatgcatcttcagacagtttatccacgttcgccaggaagtctgcttcctgaacgccagcttcacggatagatttcggaatacccagttcagctttcagcgtttccagccatgccagcagtttctcgatcttagcagcagtacggtcgcccggtgcgctcagacccaagtggtcggcaatttcagcataacgacggcgagcctgcggacggtcatactggctgaatgcagtctgcttggtcgggttgtcgttcgcattgtagcgaataacgttacaaatcagcagggcgtttgccagaccgtgcggaatatggaactgggaacccagtttgtgcgccatactgtgacatacacccaggaaggcgttcgcaaacgcgatacccgcgatagtcgctgcactgtgaacacgttcacgcgctaccggatttttagacccttcgtggtaggacgctggcagatattctttcagcagtttcagtgcctgcagagcctgaccatcagagaactcagatgccagtacagaaacataagcttccatggcgtgagttactgcgtccagaccaccgaaagcacacagggacttcggcatgtccataaccaggttggcgtcgacaatcgccatatccggagtcagcgcatagtctgccagcggatatttctgaccagtagcgtcgtcagttacaaccgcaaacggagtgacttcagaacctgtaccagaagtggtggtgacagcgatcattttcgctttcacgcccattttcgggaacttgtagatacgtttacggatatccataaagcgcagcgccagctcttcgaagtgagtttccggatgttcgtacataacccacatgatcttcgcggcgtccatcggggaaccaccacccagcgcgataatcacgtctggtttgaaggagtttgccagttctgcacctttacgaacgatgctcagggtcgggtccgcttctacttcgaagaagacttcagtttcaacgcctgctgctttcagtacggaagtgatctgatcagcataaccattgttgaacaggaagcggtcagtcacgatgagcgcacgtttgtggccatcagtaatcacttcatccagcgcgattggcagggagccacggcggaagtagatagatttcggaagtttgtgccacaacatgttttcagctcgcttagcaacggttttcttgttgatcaggtgtttcggaccaacgttttcagagatggagttaccaccccaagaaccacaacccagagtcagggaaggtgcgagtttgaagttatacaggtcaccgataccaccctgagacgctggggtgttaatcaggatacgcgccgttttcattttctgaccgaagtaagaaacgcgagccggttggttatcctggtcagtgtacaggcaagaggtatgaccgataccgcccatagcaaccagtttctctgctttttctaccgcgtcttcgaaatctttagcgcggtacattgccagagtcggggacagtttttcatgtgcgaacggttcgctttcatcaacaacggtcacttcaccgatcagaatcttggtgttttctggtacagagaagcctgccagttcagcaattttataggctggctgaccaacgatagccgcgttcagcgcaccgtttttcaggataacatcctgaacagctttcagctctttaccctgcaacagatagccgccgtgggttgcaaaacgttcacgtacagcgtcataaacagagtcaacaacaacaacagactgttcagaagcacagattacgccgttgtcgaaggttttggacatcagtacagatgcaactgcacgtttgatatcagcagtttcatcgataacaactggagtgttgcccgcgcctacaccgatagctggtttaccggagctgtatgcggctttaaccatgcccggaccaccagtcgcgaggatcaggttgatgtctgggtggtgcatcagtgcgttagacagttcaacagaaggttgatcgatccagccgatcagatctttcggagcaccggcagcgatagcagcctgcagaacgatatcagccgctttgttggtggcatcttttgcacgcgggtgcggggagaagataatggcgttacgggtcttcagactgatcaggcttttgaagatagcagtactagtcgggttagtggtcggaacgataccgcaaataataccgattggttcagcgatagtgatggtaccaaaagtgtcgtcttcagacagaacaccacaggttttttcatctttataggcgttgtagatatattcagaagcaaagtggtttttgatcactttatcttcgacgatacccatgccggattcggcaacggccattttcgcgagtgggattcgagcatctgcagcagccagagcggcggcgcggaagattttgtctacttgctcttgagtgaaactggcatattcacgctgggctttttttacacgctctacgagtgcgttaagttcagcgacattagtaacagccataatgctctcctgataatgttaaacttttttagtaaatcatctgctcgaatacgagagtatagtcagtgcggtgatgatttgcttaacctatgaaaatcaaaagcttactcgcgctcacactcactgtgatttactaaaagagtttaaacattagagttattatctctaatgcgtcacttccaggtggcgtaagcaagattactcacttctgggtactgattacgtgatccaaatcaaatttttgcaaagctgacacctttcagcatcgcttttcgccattatagctaacagttaataaattgtagtatgatttggtggctacattagcatgttttgcacaactagataacaataacgaatgatagcaattttaagtagttaggaggtgaaaaatgctgtcaaaaggcgtattgtcagcgcgtcttttcaaccttatttatggctaacattatccggcttttgcttcggagctaaccgtgattcagaccttttttgattttcccgtttacttcaaatttttcatcgggttatttgcgctggtcaacccggtagggattattcccgtctttatcagcatgaccagttatcagacagcggcagcgcgaaacaaaactaaccttacagccaacctgtctgtggccattatcttgtggatcagcctttttctcggcgacacgattctacaactttttggtataagtattgatagcttccgtatcgccgggggtatcctggtggtgacaatagcgatgagcatgatcagcggcaagcttggcgaggataaacagaacaagcaagaaaaaagtgaaaccgcggtacgtgaaagcattggtgtggtgccactggcgttgccgttgatggcggggccaggggcgatcagttctaccatcgtctggggtacgcgttatcacagcattagctatctgtttggtttctttgtggctattgcattgttcgctttatgttgttggggattgttccgcatggcaccgtggctggtacgggttttacgccagaccggcatcaacgtgattacgcgtattatggggctattgctgatggcattggggattgaatttatcgttactggtattaaggggattttccccggcctgcttaattaattcctttcaaatgaaacggagctgccatgctccgtttacttcgtcattatttttactttgttcccgcgcagttatcaaaagcaaaaggaataggtaaaaatattcttctcaaattacagttagttataaggatttccttaactgcttctcctcaccatcatgttattttcgccacatcataatcctgggcttgctgaagaataattgaaatgatattattaattccactgcctttggtagaggaaagtgctaaataataatcaattgttaaattattgtgcatttcactactggaactgtaatcagaaaagatagacatgcttagccaatctctatttgattgaattgaaagatgtttgttaaggcatggatgcaagctatagattctgatacggtcaataaaagagaattgcttaacaattttgcaaaatgtattggcgagtaagaaccgcatttggtactttccgggcaaccgccagacgattctttattggtaatgagaataattaacaattaaagagcgtcgcgaaagaataatgtgtctcgacaggggagacacagtacgaatcgacataaggtgatcgtctgaatcaccagaataaataaagtcggtgatagtaatacgtaacgataaagtaacctgacagcagaaagtctccgagcctgtgcagggtcccaatccgggattacacatgctggttaataccagtaattataatgagggagtccaaaaaacaatgaccaacatcaccaagagaagtttagtagcagctggcgttctggctgcgctaatggcagggaatgtcgcgctggcagctgatgtacccgcaggcgtcacactggcggaaaaacaaacactggtacgtaacaatggtagtgaagttcagagtttagatccgcacaaaattgaaggtgttccggagtctaatatcagccgagacctgtttgaaggcttactggtcagcgatcttgacggtcatccagcacctggcgtcgctgaatcctgggataataaagacgcgaaagtctggaccttccatttgcgtaaagatgcgaaatggtctgatggcacgccagtcacagcacaagactttgtgtatagctggcaacgttctgttgatccgaacactgcttctccgtatgccagttatctgcaatatgggcatatcgccggtattgatgaaattcttgaagggaaaaaaccgattaccgatctcggcgtgaaagctattgatgatcacacattagaagtcaccttaagtgaacccgttccgtacttctataaattacttgttcacccaagtactagtccggtgccaaaagccgctatcgagaaattcggcgaaaaatggacccagcctggtaatatcgtcaccaacggtgcctataccttaaaagattgggtcgtaaacgaacgaatcgttcttgaacgcagcccgacctactggaacaacgcgaaaaccgttattaaccaggtaacctatttgcctattgcttctgaagttaccgatgtcaaccgctaccgtagtggtgaaatcgacatgacgaataacagcatgccgatcgaattgttccagaagctgaaaaaagagatcccggacgaagttcacgttgatccatacctgtgcacttactattacgaaattaacaaccagaaaccgccattcaacgatgtgcgtgtgcgtaccgcactgaaactaggtatggaccgcgatatcattgttaataaagtgaaagcgcagggcaacatgcccgcctatggttacactccaccgtatactgatggcgcaaaattgactcagccagaatggtttggctggagccaggaaaaacgtaacgaagaagcgaaaaaactgctggctgaagcgggttataccgcagacaaaccgttgaccatcaacctgttgtataacacctccgatctgcataaaaagctggcgattgctgcctctagtttgtggaagaaaaacattggtgtaaacgtcaaactggttaaccaggagtggaaaacgttcctcgacacccgtcaccagggtacttttgatgtggcccgtgcaggctggtgtgctgactacaacgaaccaacttccttcctgaacaccatgcttagcaacagcagcatgaataccgcgcattataagagcccggcctttgacagcattatggcggaaacgctgaaagtgactgacgaggcgcagcgcacagctctgtacactaaagcagaacaacagctggataaggatagcgccattgttcctgtttattactacgtgaatgcgcgtctggtgaaaccgtgggttggtggctataccggcaaagatccgctggataatacctatacccggaatatgtacattgtgaagcactaatggcaatacgtggggcaggagtgtcctgctccacggtgtctgatttttatcgcattacagaaggcacaggccagaaggtagggcaatgttaaaatttattctacgtcgctgtctggaagcgattccgacgctatttattcttattactattagcttctttatgatgcgcctcgcgccgggaagcccttttaccggcgaacgtactttaccgccagaagtgatggccaatatcgaagcgaaatatcatcttaatgatccgatcatgacacagtatttcagctacctgaaacaactggcgcacggtgatttcggtccaagctttaaatataaagattatagcgtcaatgacttggttgcatccagttttcccgtttctgccaaactgggagccgcagcatttttccttgcggtaatactgggtgttagtgctggcgttattgccgcattaaaacaaaacaccaaatgggactataccgtgatggggctggcaatgaccggggttgttatccccagttttgtggttgcaccattattagtcatgatatttgcgatcattttgcattggctgccgggcggtggctggaatggtggggcgcttaaattcatgatattgccgatggtggcgttgagtctcgcttatatcgccagtattgcgcgtattacccgtggctctatgattgaagtattacactccaattttattcgtactgcccgggcgaaagggttacctatgcggcggatcattttacgtcacgcattaaaacctgctctgttacccgtgctctcttatatgggccccgcatttgtcggcattattaccggttctatggttatcgaaaccatttatggtttgccggggattggacaactgttcgttaatggcgcattgaaccgtgactattccttagtgttaagcctgaccatcctggttggtgctttaaccattttgtttaatgccattgtcgatgtgctatatgcggttatcgacccgaaaatccgttactgatactggagctcgcgatgatgttaagtaagaaaaacagcgagacgctggaaaatttcagtgaaaagctggaggtcgaagggcgcagcttgtggcaggacgcacgtcgacgttttatgcataaccgtgcggcggttgccagtctgatagtgctggtgctgatcgcgttatttgtaatcctggcaccgatgctttcccagtttgcctatgacgatactgactgggcgatgatgtccagcgccccggatatggagtccggtcactactttggtactgacagttccggtcgcgacctgcttgtgcgcgttgcgattggcgggcgtatcagtctcatggtcggtgttgctgcggcactggtggctgtggtcgtcgggacactttatggtagcctttccggttatctgggcggtaaagtggatagcgtaatgatgcgtctgctggaaatcctcaactccttcccattcatgttcttcgtcattttgctggtgacctttttcggtcaaaacatcctgctgattttcgtggcgataggcatggtttcctggctggatatggctcgtattgtgcgtgggcaaaccctgagtctgaagcgcaaagagtttattgaggcggcacaagttggcggtgtaagcacaagcggcattgttattcgccacattgtgccgaatgtactcggtgtggtggtggtctacgcaagtcttctggtgcccagcatgatcctctttgaatctttccttagcttcctggggttgggtacgcaagagccgttaagcagctggggtgcattgctgagtgatggcgcgaacagcatggaagtctctccatggttattgttgttcccagcgggattcctcgtggtgacgctgttttgtttcaactttatcggcgatggcttgcgtgatgccctcgacccgaaagatcgttaaggagtgcagccatgagcgtaattgaaactgcaactgtgccgctcgcacaacaacaggctgacgcactgctgaacgtgaaagatttgcgtgtcacctttagtaccccggacggcgacgtcacggcggtcaatgatttgaatttttccctacgtgccggagaaacgctgggtattgtaggtgagtctggtagcggtaaaagccaaactgcatttgcgttgatgggcctgttggctgccaacggacgtattggcggaagcgcaaccttcaatgggcgtgaaatcctcaatttgccagagcatgaactcaataaactgcgcgctgaacaaatcagtatgatttttcaggacccaatgactagcttgaatccctatatgcgcgtcggtgagcagttgatggaagtgctgatgctgcataagaacatgagcaaagctgaggcgtttgaagagagcgtgcggatgctcgatgcggtaaaaatgccggaagcgcgtaaacgcatgaaaatgtacccgcacgaattttctggcggcatgcgtcagcgagtcatgattgcgatggccttgttatgtcgacctaagctgctgattgcggatgaaccaacaactgcgctggacgtcaccgtacaggcgcagatcatgacgctattaaatgaactgaagcgggaatttaataccgccatcattatgatcacccacgatcttgtcgtggtggcggggatctgcgacaaagtgctggtaatgtacgccgggcgcacgatggaatatggcaacgcgcgcgatgtcttttatcaacccgttcatccttattctatcggtttgctcaacgcggtgccgcgtctcgatgcggaaggtgaaacaatgttgaccatcccgggtaatccgccaaacctgctgcgattaccgaaaggttgcccgttccagccacgttgtccgcatgcgatggaaatttgtagtagcgcaccgccgctggaagagtttacgcctggccgtctgcgtgcttgctttaaaccggtggaggaactgttatgaatgctgtaactgaaggaagaaaagtcctccttgaaatcgccgatcttaaagtgcactttgaaatcaaagatggcaaacagtggttctggcaaccgccgaaaacgctcaaagccgtcgatggtgtcactcttcgcctgtatgaaggggaaacattaggtgtggtaggggaaagcggatgcggtaagtccacctttgctcgcgccatcatcggtttggtcaaggcgaccgacggtcatgttgcctggttaggtaaagagttgctgggcatgaaacccgatgaatggcgtgccgttcgcagtgatattcagatgattttccaggatccgttggcaagcctaaacccgcgtatgaccatcggcgagatcatcgctgaaccactgcgtacttatcatccgaaaatgagtcgccaggaagttcgcgagcgcgtgaaggcgatgatgctgaaagtcgggttattgcctaacctgattaaccgctatccgcatgagttctctggtgggcagtgccagcgtatcgggattgcgcgtgctcttattcttgaaccgaagctgattatctgtgatgagccggtgagcgcgctggacgtgagtattcaggcacaggtggtcaacctgctccagcaattgcaacgtgagatgggattgagtttaatttttatcgctcatgacctggccgtggtaaaacacatttccgatcgtgtgttggtgatgtatctcggccatgcggtagaactggggacctatgatgaggtctaccacaatccactacatccttacaccagggcattgatgagcgcagtccccatacctgatccggatctggagaagaacaaaaccatccagttactggaaggggaattaccgagcccgatcaacccgccttccggttgtgttttccgtacccgttgcccgattgccggtccagagtgcgccaaaacacgtcctgttctggaggggagtttcagacactccgtttcttgcctgaaagtcgatccgctttaaaaacaataagggctgacagttgtcagccctttttcacgctaaaagcgattatttattcccgccagatgatatggcaaagtttgtgatctttttcgcggcataacagaatgcgggcaaaaacatcgttgatttcaccatcttcactgtccgccagaccaatcaccacttcggcaaaaaagtccgggttcaaatcgaaatcaacatgttcctgccagtcttccgccggatcgaataactccgcgccgccgcgctcttcaaactgaagattgaacagcagaacatcagctggatcgagattgtcggcagccagttcgagaaaaatatcgtaggcctgttcaagcgtttcatcttcagtcaggcgattgtttagatccatatccatagttactacctgtttaacctctgttggcgacgttttacagcaacggactgaagaagtaaaacagtcgctcggcgacacgttgccataatggacgttttagccataaacgggcatcgagcagacgactacggctaatataatcgtcctgaacggcggcgaggtcagcaccaaaacctttatcgtcgattgccagggtaatctcgaaatttagccacagactacgcatatcaaggttaactgtgccaaccagacttagttcgccatcgaccagcacgctcttggtatgcagtaacccgccttcaaactgataaattttaaccccagcagccagcagttccgtaaagaatgcgcgactggcccagccgaccagcatgctgtcattttttcgcggaaggataatactgacatccaccccgcgctgcgccgccgtgcaaatcgcatgaagtaaatcatcgcttggcacaaagtagggcgtggtcatgatcaaatattcacgcgcgctataagccgcagtcaataatgcctggtgaatgagatcttccggaaagccggggccagaagcaattgtgtgaatggtgtgaccgctggcctgttcaaacggcataatattgacatctggtggtggcggcagaatacgttttccggtttcaatctcccagtcgcaggaataaataatccccatcgcggtggcgatagggccttccatacgcgccatcagatcaatccattgccctacgcccgcatcttgtttgaagtagcgaggatcgaccatattcatgctgccggtgtacgcgatgtaattatcgatcatgatcatcttgcgatgttggcgcaggtccatacggcgtaaaaacacacgcatcagattgacctttaaggcttcgaccacttcaataccggcattacgcattagctcgggccacgggctgcggaaaaaagccacactcccggcggagtcgagcatcaatcggcaatgaatgccgcgtcgcgcagccgccattaaactttcagccacctggtccgccatgccgccgggctgccagatataaaacaccatctcaatattatggcgcgcgagctggatgtcgcggattaacgcctgcatcacatcatcactctcggtcatcagttgtagctgattccctttgaccccagcgatcccctgacgacgctcgcaaagcttgaataatggcgcagcgacactgctattttcttcggcgaagatatgcttacaggctttaaggtcgttaagccattttgcggtggaaggccacatcgctctggcgcgctcagcgcggcgtttgcctaaatggagctcgccaacggcaagataggcaataattccgactaacggcagaatgtaaataatcaacagccaggccatcgcggagggaactgcgcgtcgtttcattagaatgcgtaaagttacgcctgcaatgagcaaccagtatcccagaatggccaaccaactcaccaacgtataaacggttgtcatagattagaaatccttttgaaagcgcattgttatgagtttacgcatatggattcatctggcaaataaaaacgcgggaaaagcactggtcagcgtcgggggtgggggtataatgaccattctgttattgcatagagtagttaacatgaagcggagtagaacggaagtggggcgctggcgcatgcagcgtcaggctagccgacgtaaatcgcgttggcttgaggggcaatcgcgccgaaatatgcgtatccacagcatcaggaagtgcattctaaacaaacagcgtaactcgttattgtttgcgatctacaatatctaaatgtactgggcaccattgcggtgcccaataagtttactcttccgtctttaaactttatttttgcgcgctttctttactgtcagctttcgtttctagttcatcgttatcgctgaaaataccatgaccactgttcaacaacatactaacgagcatatcattattaatctcttcaccatttaaaactcgcgccagaatttcgctgccaaacagttgcggactgagaatgatatccggatgtaccatcttaatcttattcaggtttttgctatcactgacggcgagaactgttttgacatcactgctcatatcttttgcgctgagtacaacaaacgcgttatctgcatcgttatcactcagcgccagaatggcccggcaacgatcgattcccgctttctttaatacagaactgtcattactgtcaccggggataacatcagcattatcgcctaagcgttgctcaagttgcttgatatcatcttcaggcaagttgctgataaccgttacgttttgtccgcgttgattcagttgcaggatcgtattgatggcgagaatgctatgtccgcaaacaataaaatgatctttacgatgcattgtatgattgtttccttttacaagtttgttgaatcccccgcggataagcggaccaaaaatactggtcatagatgtggcaaaaacggtaatgccggaaataatgacgctaatagtgaacaatcgtgcactttcagaaacagggacaatatcgccatagccgacggtactcatggtttctatgctaaaatagaacgcggtcatcaaactttctattcgcggattaaaaccttcgcttaaataaagcgcaccgtaggtactgtaaaacagtaatgtcgtgaaactaataaatgcaaaaattgtcccggctgcggcgctactgtgggagaagtctttgcgcagtatcagcaaaaacaccagcgtaaaaatgcaaaatccaatactaaatttcagccagggataaaaatgcagggtgtaaattagcgctatcaacaacaaaatgatactgattgcccatgcgagctttgcccggaacagtaagccaatggagttcaggacaagaaagacgccgagcataaagagtggggcgtttgccagcaaggagagatccaactcactaaatgctttgatatggaaaatatcaagcaaattgacgctcataccatagattgttttaaaaataagcaatccatttaaaaagacggccagcgcgagaatgtcgtgccgaagggtcacccataaatttgttgctgtttgtttgaatgtagcccagtgactcactgatacctctgtaaccacaattttgtttaattatcttagcgtgcacattttctgaacatacatgcagcgcgtgaatgtgttaaacaatagtagatgactttatccgcagtaatcaaaggatttgagcgagcaactgtacctcaggaaaggtcatttttcctgaatatgctcacatcatataaagaaatacagataaagttattatctgcttgtggtggtgaatgcactgaccggctataaggaaaggccaaacaagaacacggttgcaaaaaccgtgcccttaaatattgaatctctattcagaacactttcttaaatggtttcacactaacgtgttcatagactcctgccgctacgtacgggtcagcatcggcccaggcctgagctgcttccaggctttcaaattcagcaataacggtactgccagtaaatcccgcagcccctggatcgttactgtctaccgctggcattggaccagctgtcaacaaacgaccttcatcatgcagtaactgtaaacgtgctaaatgtgccggacgaacggaaaggcgtttttcgaggctatcagctttgtcttgagcgtaaataacatacaacacgggcacaactccttgttcgggaaagttgtaaagtacgttatttgaaagggcgaagatctgcaacggaaagatgatgtctttgttaaggccatgcataaagtaagggtaattacgccaaaaatgacattttcactgatcctgatcgtcttgccttattgaatatgattgctatttgcatttaaaatcgagacctggtttttctactgaaatgattatgacttcaatgacccttgatttacctcgccgcttcccctggccgacgttacttagcgtctgcattcatggtgctgttgtggcgggtctgctctataccagcgtacatcaggttattgaactacctgcgcctgcgcagccgatttctgtcacgatggttacgcctgctgatctcgaaccgccacaagccgttcagccgccaccggagccggtggtagagccagaaccggaacctgagccgatccccgaaccgccaaaagaagcaccggtggtcattgaaaagccgaagccgaaacctaagccaaaaccgaagccggtgaaaaaggtacaggagcagccaaaacgcgatgtcaaacccgtagagagccgtccggcaagtccgtttgaaaatacggcaccggcacgcctgacaagtagtacagcaacggctgcaaccagcaagccggttaccagtgtggctagtggaccacgcgcattaagccgtaatcagccgcagtatccggcacgagcacaggcattgcgcattgaagggcaggttaaagttaaatttgacgttacgccggatggtcgcgtggataacgtacaaatcctcagtgccaagcctgcgaacatgtttgagcgtgaggtgaaaaatgcgatgcgcagatggcgttatgagccgggtaagccaggcagtgggattgtggtgaatatcctgtttaaaattaacggcaccaccgaaattcagtaagcagaaagtcaaaagcctccgaccggaggcttttgactattactcaacaggtaaggcgcgaggttttccttcaggatcaaccgcgacatacttaaataatgcttctgtcgctttatagcgttgcccaattggttcagacgctacttttttcacccacacttcaatattaatgctgacgcttgtcgtccctttctggacacagcgtgcatagcagcacaccacatcgccgaccgcaaccggccgtaagaaagtcattccttcaacccgcacagtcactacgcgaccgtgggcaatttcttttgccagaatagcgccgccaatatccatttgactcattaaccaaccaccaaagatgtcaccattggcattggtatcggcgggcatggctaaagtacgtaaaacaagatcgccctgagggacgttatgtgttgtagacatggtaaaaccgacttaaaaggaaaatcacaggcgcgatgctactatgattttcctgaggagaacagaggagatacagcgccagccccgaaggactggcagtctggttaggatttatcttcctgcggcatgtggcggtagatatagataccgcttaacaatgtgaagattaaggtaagggcggtcaggccaaagactttaaagttgacccaaatattttgcggcagccagaatgcgatgtagatgtttgccagaccgcaaaggataaagaaaacagcccaggccagattcagcttgctccataccggttgcggcagcgtgagttctttacccagcatccgctgaattagcggctttttcatcacccattggctgactaacagggctcccgcaaatagagcataaatgacagtaaccttccatttaataaactcatcattgtggaagaacagcgtcaagccaccgaagacgaccaccagaacaaaagtgatcagggccatcttctcaaccttacgaaagcgaacccagctatagataagcacaatcgccgtggcgacgatcagcgccgcagtagccgcatagatgtcataaatcttgtaaaacgcgaaaaagacaaccagcggtaaaaaatcaagaaactgcttcattttacgattccgtaatcaaatgcttaaggttattggcgaatcaacatatacaggcggaacagatagatgagcaatatggcactaatcaggttgctcaaggtgttcgccagtacggcaccaatttccggggttaatgcggcaaaagaagaggcaaaaagcagcaacagtgtttttgccagcaaccagctcagtactgcgggtgccaccagacgcatattcgcccaagtcagccgcatactgctacgcatgctggcaaaaacgcccattttgtcctgtaccaacatcaccggtgccagggccagtaaaatggccatgataattcccggaacgaccaccagcatgatgccaatctgtactaaaagggtagtcagaaaaatcagaataaataactttggcaatatcggcgcactggcaccaatagctcgcagcgcactgactctctgacccgcagacaccagctggataattaatattacgcctccggcgagaatggcgttaccgattaatccactaaaagtggacgccgcactagcctgcagcaaaatttgttgctgttccggactcatattctgaaccaggtcgaacaacccactactgccgctaacgggcacgccgtcattgagctgcgcaagctgtgcatcactgggactgaaaacatgccctaacaccactgtgataaacgcacatagcaagcttaccaacagaatggtcataaattgattacggaagaaatttccggtgtcacggtatacggactgcgccgtgatagacatgcactctccttgagttttatgcaggtgttaattagcgggcaattgtaccctggttaagcctcgggtggcagcatcaggtcttgtatggaaaagcatatctttgtaaagcggaggtaattgctggccttcaggcatgggcaaatcgcggcaagtggcgaccgagttaatatttgcgtagcgaaaatatttaaaaattgatttaaatcacattaaccaggattctcaatgcaacttctaaattaatccagatcaataaagggtgaattatcatatgtaatgtgatctatgtaggatcatttgttactccaatgtaggtatattcgtcacgtttttataaccataacgacggagcggatatgaaaaagttaacagtggcggctttggcagtaacaactcttctctctggcagtgcctttgcgcatgaagcaggcgaattttttatgcgtgcaggttctgcaaccgtacgtccaacagaaggtgctggtggtacgttaggaagtctgggtggattcagcgtgaccaataacacgcaactgggccttacgtttacttatatggcgaccgacaacattggtgtggaattactggcagcgacgccgttccgccataaaatcggcacccgggcgaccggcgatattgcaaccgttcatcatctgccaccaacactgatggcgcagtggtattttggtgatgccagcagcaaattccgtccttacgttggggcaggtattaactacaccaccttctttgataatggatttaacgatcatggcaaagaggcagggctttccgatctcagtctgaaagattcctggggagctgccgggcaggtgggggttgattatctgattaaccgtgactggttggttaacatgagtgtgtggtacatggatatcgataccaccgccaattataagctgggcggtgcacagcaacacgatagcgtacgcctcgatccgtgggtgtttatgttcagtgcaggatatcgtttttaattccgcacaaaaacgaccccgtaatatacggggtcaataaggacatggtataaagggtattatttcttcgcttctacgccatcagtttcagagcgaattaaaaatttctcagttgtttgcggaatattctgaatcagccagtcggccatttgcttttcctcatttaaaatcgcttcgatggttggaatactagctgtatcaccggcattttttgctgctgctaatagactggtgtaacaggcgatttcaaattgctcgaagacatatccgctaatagagcctttgactatttcatcagaagggaatataccaccgatactctgcccaagcgcagccattttactcatggaatctttaatgacactacgactaatgtcattacgatcaagaatagtttccagttgaacaatctggtttttggtttcactaagatgttgttcaatacgagcgcgtagttcaggataattatctatacggctggccatggattcaagcatagattcggcttgcttttccattgcgtgggcgtcacgtaaccagtcatgataatgttcaatacgattcatgaaaatgtcctctttataaaatgactaaaagttaaaattcatatttcaggctttattttcggctttcttatttacgttattaatggccagatcagtcagtttgatgtcggtggccttttcttcttccagggtttctttcagaagcttcgctgctttacggtaacctaattgttcagccagcgtcgctaatgtcccgtaactggcaatctcataatgctcgactttctgtgctgcggcaatcagtgcggcatcacgcacttcgtttttctcggtactttcgatgacctcattagcttcttcaataagaccttccattgccacacatttcatgcgcttaattttcaggttgctttcggactccacaacttgatcaatacgttcaatctgtccatgagtttcctcgaggtgcgcatgaaaagcctgacttaatttttcattacttgttgctcttgcgagttttgccagtgcccgggttaattgtttttctgcgctgtaggtatcactaagcaggtgaataaatacatcttcaatggtcttcatattcatatttttctccagtgaaatcactgcgagccatacggcccgcagatgcaattatctttatcagctgatattaataattaacggtgaatcaggatttgccacttttattaccaccgctttgttgaccgccttttttacccgcttcagatgcgcgttgcggatcatttttaaaattaccgccgctatgctgaccgcctttacggcctgcgtcggatgccttctcacggtcttcggcgaaatttccactaccaccacgatgttcggccatgttatttctcccgttgcgttgcattgtttcattaatatgagtgttgtgtgtcgacactcattaaaattagtcgctaatgagaattagtcaaattaagcgcaacgagaagatagagggaaaatatattttgaggaacattctggatatattaacaattacctgaggaataagtgacttagagaaaattattgattttactggtgttatgttgcgggattaatttgtttgattatattactgttgggcggaaaaatgacgtaagttgacgttcgaccggggtaagcgaaacggtaaaaagataaatattaaatgaatttaggatttttccggcttcattaaagaaagttaaaatgccgccagcggaactggcggctgtgggattaactgcgcgtcgccgctttcatcggttgtacaaaaactttcagtgccgccagcattttctctggctcattaatatgttgctcgatgattttaacaatggcgctaccagaaatcgcgcccgcagctcctgcatcaatcgctgcttttacctgatccggggcggaaataccaaatccctgcaatggaggtgcagcgttgtactctttcagcttcgcaaccagatgattgaggggtaacgcggcgcggttttctgcgccggtcacgcctgctcgactcagcaaataggtgtaaccacgaccgtaagaggctatctggcgcagcaggtcgtcatcggcatttggcgggcagatgaagataggtgcgacattatgacgcaacgcggcctggcggaagggcgcggactcttcaactggcacatcggcaaccagcacgctatcgacgccgactttttcgcactgggcataaaactcatcaatgcctttgttaaacaccagattggcatacatcaacaggccaatgggaatggtcgggtgtttctggcgaatcagtgccagcatttcaaaacattgtgccggagtcacacctgccgcaaaggcgcgcagagtggcgttttgaatcgtcgggccatccgccagtgggtcggagaaggggatacctaactccagcgcgtcagcaccggcttcaattagcgtatcgataattttcaaactctgctcaatgcccggatcaccgagcgtgacgaaaggaacgaatgcgccttctttgcgctccttcaactgggcaaacagagattcgtagcgttccatcagatttcccctcgtgctttcaaaatatcgtgaacggtgaagatgtctttatcgccgcgaccggaaaggttaaccaccagtagctgctctttatccgggttttcgcgcatcattttcaacgcatgggccagggcgtgggaggattccagcgccgggatgatcccttcgtgcaggcacagcgttttgaaggcttcaagggcttcatcatcggtaatagacacgtaatcagcgcgtccagtgctgttaagatacgcgtgttgtgggccgacagacgggaaatccagtccggcggagatggagtaagattcttcaatctgcccgtcttcggtttgcatcatcggcgctttcataccgaaatagatacccacgcgaccatgttttagcggtgcgccgtgctcgccagtttcgataccgtgaccacctggctccacaccaatcaggccgacgttggtttcattgatgaaatcagcaaacatgccgatggcattgctaccgccgccaacacaggcgataacggcatccggcaggcgaccttctctttccagaatctgcgctttggtttcttcgccaatcatccgctgaaactcacgcacaatggtcggataaggatgcgggccagctgcggtgcccagcatatagtgcgcggtttcgtaactaccggaccagtcgcgcagcgcctcgttacaggcatctttcagcgtcgcggaaccgctatgcaccgggatcacttccgcacccattaagcgcatacgaaaaacgttagggctctggcgttcaacgtctttggcacccatataaatacggcatttcaggccgagcagggcgctggcaagggcgctcgccacgccatgctgaccggcaccggtttcggcgatgatttcggttttacccatccgcttcgccagcaacgcctgccccagcacctggttagttttatgcgcgccgccgtgcagcaaatcttcacgcttgagatacagcgtggtgttcgtcccggctgtaatgttctggcatttggtcagcgcggttggacgcccggcatagtttttcagcaggtcgttgaactgagcctgaaattcaggatctttttgcgcactgacaaaagcttcttccagctggcgcagagcaggcatcaggatttgtggcacgtacatgccgccaaactcaccaaaataggggttaagtaatgttgtcattgttcctttccttaatatgcgcgcagcgtctggaaaacgctggccaaaagacgtgcgtctttgatgcccggttggctctctacagcagaattaaaatcaagtccggcgcagccggtttgtgccgcttccacgcagttatctgcgcctaagccccccgccagcagaacgttgccaaggctttgaccatttaatagactccagtcaaaacgttgcccgcttccaccctggccgttgtctaaaacatatttatcaacgtgctgaaactcgcgggcgggcagggtttcaccgacgcttaatgctttccagatggcaacatgtgctggcagagcttcacgcagcgtatcgatatacagctgttcttcattaccatgcagttgcactgccgccaggcttaacaccttagctttgtccaccacatcggcaatatcgtgattgcggaacacgccaacatactgcaacggtgccgcagccatcacttcctgcgcctgttcaacgttgacgcaacgcggacttgtcgcaacaaaaatcaacccaccgtaaatcgcgcccgcgtcataagctgctttagcatcttgcccacgcgtcaggccacatactttattctcacccagcaacacccggcgcacggcggcgtgcaaatcgtcatgggccatcaacgcgctaccaatcagaaaaccgttagcgaagtggcttaactcgcgcacctgagcgtaagtattgatgccggattcgctgattaccgtcacgttgtgccccagtttcggcgcaagctcgcgggtacggttgagatcaatgctcaaatcacgcagatcgcggttgttgatgccaacgacctttgctcccaatgcaatggcgcgctcctgttcctcttcattactgacttcggtcagcacccccatctccagactgtgagcgacggcggcaagctggcgatattggtcgtcatccagtacactaagcattaataagcaggcatcggcctggtaatagcgcgccagatagatctggtaagggtcgataatgaagtctttacataaaatcggctgcggggcgatttggctgacgatggggaggaaattaaagctcccctgaaaatatttctcatcagtcagcacgctaattgcgctagcgtaatgtttataaatggcggcaatgcgtgctggatcgaaatcatcacggatcacgcctttactcgggctcgctttcttgcactccagaataaacgccgtgcgcgcaccctgtagcgcatcataaaaatgtcgcgtgctcggctgaacctcattctgaaaactggccagcggttgctgctgtttgcgggcttctacccaaatcgccttgtctgcgacgattttcgctaaaacggtttgcatcatttaccctcgtgccgccagtgcggtgactctgtcgtaagcggaaccactgcgcagtacctcaagaacggtttgcgcattggcttgcagatcttcatggccatgcaggcgcattaacatggcgacgttcgcagcgacggctgcttcatgggcggcgtcgcctttaccttgtaacaaacgtgttaaaatgtcacggttttcttccggtgttccgcctgccagttgctcctggtggtagggtgtcaggccaaagtcttctgcggtgagctgatagcttttaatttcgccgtcatgcagttcggcaacgattgtcggcgcgtgtaaactaacttcatccatcccgccgctgtgcaccaccgccgcgcgttgataccccagcacgcgcaaggtttcggcaatcggcagcaccagttccggactataaacaccaattaacgccagcggcggatgcgccgggttaatcaatggccccagcacattgaacagggtgcgggttttcagttgctggcgaaccggcatcgcgtggcggaatccggtgtgatacttcggcgcaaagaggaaacatacacctaactcatccagcgcctggcggcttttatcggcgttcatatcaagattaataccgaacgccgccagcagatcggagctaccagatttactggagacgctacggttgccgtgtttcgccactttcagcccacaggccgcggcgacaaacgcactggcggtagaaatattgatactgttgctgccgtcaccgccagtaccgacgatatcagcaaacagataatccgggcgcgggaacggcgctgcgttttccagtagcgcggttgctgccccggcgatctcgttcgggtgctcaccgcgaattttcatgctcaccagcgccgccgccagttgttccggcttcagctcgccacgcaccaccgcactaaacagctggtggctttcttgttggctaagcgtctgcgcctgatacagtttttccagaatcggttgcagcgtgttggctggctctagtttctgctgcgcccaggccagcgtttgttccagcaggcgagcgccctgggtggtgagaatggattccggatggaactggaatccacaaacgcgatccgcatcgtgacgtactgccatcaccatgccattaaaatgggcgttgatggttaaaccggccggaatgttactgccaaccaggctgtgataacgcgccaccggcagcgggtttgttaatccggcaaacatcgcctgaccgtcatgttcaatgctggaggctttaccgtggagaatttcgcccgcctgaccgacatagcccccgtaagcttcgacaatcgcctgatgtccgaggcaaatgccaataatgggcagcttgccacgcaagcgggtgaggagttccggcatacaaccggcttcgctcggcacaccggggccaggagaaagcatcagcaccggattgctcatggtcgccaggcgttcaattaaggtttgcgccggaatatggttgcggtaaatcaccacgttatgcccattgctgcgcaactgatctgccaggttgtacgtaaaagagtcgatattatcgagcagcagaatgtcagccatcagaaagtctcctgtgcatgatgcgcggtggcaatagcgcgcagtacagcgcgggctttgttacgggtttcgtcggcttcgctctgcggaacagaatcaaggactacaccagcacccgcttgcacggtggcgataccgttttccaccagcgcgctgcggatcacaatgcaggtgtcgagatcgccatgcgcggtgaaataacctaccgcgccgccgtagctgccgcggcgacgaccttccgcctcggcaattaactgcatagcgcgtactttcggcgcaccgcttaacgtccccatattcatacaggcgcgataagcgtgcagggcgtcaagatcgtgacgcagttcgccgactacgcgagagacgaggtgcatcacataggaataacggtcaactttggtgagatcggcgacgtagcggctgccgggggtgcaaatgcgtgccagatcattacgggcgagatcaaccagcatcagatgttcagacagctctttatgatcggtacgcatttccagttcaatacggctgtcgagatctctgtccagactaccatcggcgcgacgaccgcgtgggcgtgttccggcaatcgggtagatctcaatctggcggctggtggcatcatacttgaggctgctttccgggctcgcgccaaatagggtgaaatcattatcctgcataaaaaacatgtacgggctgggattactctttttcagcacgtaataggccgccagcggactcgggcagggcagagagaaacggcgagatggcaccacctggaaaatttctccagcgcgaatcgctttttgcaacaaacgcactacgccaccgaactcttcatcgctctgattacattcacaacgcatatgcggcacggaaaccactggcagcggcggcgcggcttcggtcagttgctgacgtagttcgttcaggcgagcagtgagacgttgtttttcttcttcattcggagcaaacaggctggcctgaatacgggtgctttttttctgatggtcaatcaccatcagcgtttcagcgagataaaaacagaaatcagggcagttattttccgcactcagttgcggtaaatcttcaaatcccgccacaaggtcataagagaacaggccgccgaagaacatggcttctcgttcttccttcggtacattcaacagattctgcaataaacggaaagcgtcaaaaacgctaagggagcataagcgggcgtcttcatccagcagtggactgacaggggggaagcgcagcacacggcagtttggactttgttcactttccacacccgcaggcagggcgttatccagtagtgccaggagggcttcgccgttgccggaaagtgcctggattgtgacagtgtcacctaaagctgtaatgcgcagcgcactgtctaccagcagcaggctttttaaatcatctttgctgtcgatatctgcggattccagcagcagcgttgccggacgatccccacacaactggtgaaaaagcgcggtgggattgtcgcgataagcgccttcgcaggttagcagttcgagagtcggtttttgtgtttgcattgttattctctaattttgttcaaaaaaaagcccgctcattaggcgggctgggtatctgattgctttacgcatggtgaatacactgcccgtttcaggaagtgcgccaccaacctttcagtacgaaaattgctttcattgtcgataccctttttacgtgaacttgcgtactagttaactagttcgatgattaattgtcaacagctcatttcagaatatttgccagaaccgttatgatgtcggcgcaaaaaacattatccagaacgggagtgcgccttgagcgacacgaattatgcagtgatttacgacctgcacagccataccacagcttccgatggctgcctgacgccagaagcattggtgcaccgtgcagtcgagatgcgcgtcggcaccctggcgatcaccgaccatgacaccacagctgcaatcgcgccagcaagagaggaaattagtcgtagcggactggcgttgaatcttattcccggcgtggaaatttccacggtctgggaaaatcatgaaattcatattgtcgggctgaatattgatattactcatccgctaatgtgtgagttcctcgcgcagcagacagaacggcgcaatcagcgggcgcagctgattgccgaaagacttgaaaaagcgcaaatacctggggcgctggaaggcgcacaacgactggcgcagggcggcgcagtgacgcgcggtcattttgcgcgtttccttgttgagtgcggcaaagccagtagtatggcggatgtctttaaaaagtatctggcgcgcgggaaaaccggatacgttccgccacagtggtgtacaatagaacaagctattgatgtcattcatcattctggcggtaaggcggtgctagctcatcctgggcggtacaatcttagtgctaaatggctgaaaagattggttgcgcattttgccgaacaccacggtgacgcgatggaagtcgcgcagtgccagcaaagccccaatgaacgtacccagctggcggcccttgcgcgtcagcatcatttatgggcaagtcaaggatctgattttcatcagccatgcccgtggatcgaactgggtcgtaaactctggctgcccgcaggcgttgaaggcgtctggcagctatgggaacagccgcagaacaccacagagagggaattatgagccagtttttttatattcatcctgataacccacagcaacgtctgatcaaccaggcggtggagatcgtgcgtaaaggcggggtgattgtttatccaactgattccggctatgcgctcggctgtaaaattgaagataaaaacgcgatggagcgtatttgtcgtattcgccagctgccggacggtcacaactttaccctgatgtgtcgcgatctttctgaactcagcacctatagttttgttgataacgttgcgtttcgtttaatgaaaaacaacacgccgggcaactataccttcatcctgaaggggacgaaggaagtgccacgccgtctgttgcaggaaaaacgcaaaaccatcggtatgcgtgtgccttctaaccctatcgctcaggcgttacttgaagcattgggcgaaccgatgctttccactagcctaatgctgccaggcagcgaatttaccgaaagcgacccggaagaaattaaagatcgtctggaaaaacaggtagatttgattattcacggcggctatctcgggcagaaaccgacaacggttattgatcttaccgatgatacgccggtcgtggtgcgtgaaggcgtaggtgatgtgaagcctttcttataacaaattgcgttccacggatggaagactatggcagggaagtttcgctgcattttgctgttgatagcagggctgtttgtaagttctctaagttatgcagaaaacacggagatcccttcttatgaagaagggatcagcctctttgatgttgaagccactctgcaaccagatggggtgctcgacatcaaagaaaatattcattttcaggcgcgaaatcagcagattaagcacggcttttatcgtgatttaccacgactatggatgcagcctgatggggacgctgcactgctgaactatcatattgttggcgtcacccgtgatggtattcctgaaccctggcatcttgactggcatatcgggttaatgagtattgtcgtgggcgataaacaacgtttcttgcctcaaggcgactatcattatcaaattcattatcaggttaaaaatgctttcctgcgtgagggggattctgatctgctaatctggaacgtgaccggtaaccactggccgtttgaaatttataagacccgtttttctctccagttctctaatattgcgggtaatccatttagcgaaatcgatctttttaccggagaagagggcgacacatatcgtaatggccgcatccttgaggacggaagaattgaatcccgcgatccgttttatcgtgaagatttcacggtcctctaccgctggcctcacgctttacttagcaatgccagcgctccgcaaacgacgaatattttcagccatcttcttttaccctccacgagtagcttgttaatttggtttccgtgtctgttcctggtttgtggatggttatatctctggaagcgcaggccgcaatttacgccggtagatgtgattgaaaccgatgtcattccgccagattacacgcccggcatgttacgtctcgatgcgaagctagtttacgacgataaaggtttttgtgccgatatcgtaaatctgattgtgaaaggaaaaattcatctggaagatcagtctgacaagaaccagcaaatcctgattcgtgttaatgaaggcgcgaccagaaataatgcggtattactgcccgcagagcagttattactggaagcgttatttcgtaaaggcgataaggtcgttcttacggggagacgcaacagagtcttacgcagggcatttttacggatgcagaaattttatctgccgcgtaaaaagtctagcttttaccggtctgatacttttttgcaatggggtggactggcaatattggcggtcattctttacggtaacttgagtcctgtaggctgggcaggaatgagtctggtgggcgatatgtttattatgatctgctggattattccttttttattttgttcccttgagcttttgtttgcccgcgatgatgacaagccttgcgttaatcgtgtaatcatcactttgtttttaccactgatttgtagtggcgtggccttctattctctctacatcaatgtcggagatgtattcttttactggtatatgccagcgggttattttaccgctgtttgcctgaccggttatctcactggcatggggtatatttttctgccaaagtttacccaaactggacagcaacgttatgcccacggtgaagctatcgttaactatcttgcgcgtaaagaggcagcaacacacagtggacgtcggcggaaaggggaaacacggaaactggattacgcgttgctaggttgggctataagcgcaaatttggggagggaatgggcgttacgcattgcccctagcctttctagcgcgattcgcgctccagagattgcccgtaacggcgttttattcagtttacagacgcacctaagttgcggggccaataccagtttgttggggcgaagttattccggtggtggtgctggcggcggcgcgggtggcggaggcggtggtggctggtaattaagctgatgttaatcgaaacaagctttaaccataaagatagtgtagtatgttgcgcctcaaagccaggccgataaacgtcgagtcgtttacttaaggcctgaagagttcaaacagactttactatcagtgagtcagatgtaagttctgactcactgttgcacaaaagcatatcagacgcctgggaaggcgacaccaaaaggaagctctatgagcgaaaagctacagaaagtgctggcgcgtgccggccacggttctcgccgtgaaatcgaatctattattgaagccggtcgtgtgagtgttgatggcaaaattgctaaactcggcgatcgtgttgaagttacccctggattgaaaatccgtatcgatggtcacctgattagcgtacgtgagtccgctgaacaaatttgtcgcgttctggcctattacaaaccggaaggtgagttgtgtacccgtaacgatccggaaggacgtccaacggtgtttgaccgtctgccaaaactgcgtggcgcacgctggattgccgtgggtcgcttggacgttaatacctgtggtctgctgctgttcaccaccgatggtgaactggcaaaccgtttaatgcacccaagccgtgaagttgaacgtgaatatgccgtgcgtgtatttggtcaggttgacgacgcgaaactgcgtgatttgagtcgtggcgtgcagttggaagatggtccggcagcttttaaaaccatcaagttcagcggcggcgaagggatcaaccagtggtacaacgtgactctgaccgaaggccgtaaccgtgaagttcgtcgtctgtgggaagcggttggtgtgcaggtgagccgcctgatccgtgttcgttacggtgatatcccactgccaaaaggtctgccacgcggtggctggacggagctggacctcgcccagactaactatctgcgcgaactggtggagctaccgccagaaaccagctctaaagtcgctgtagaaaaagaccgtcgtcgcatgaaggcgaatcagattcgtcgtgcggtgaaacgtcacagtcaggtgagcggcggtcgtcgttctggcggacgtaataataacggttaatcaaagtatgccggacgtcatatccggcatttttacagattaataatcgatccctatctgcgcttttacaccggcatcaaacgcatgtttgacggggcgtaattcacttaccgtatctgccagttcaagaatatcccgatgacaaccacgacccgtgataatcaccgtctgttgatgtggacgttcatttaacgcctgcaccacttcttccagtggcaaatagtcatacgccaccatatacgtcagttcatcaagcaaaaccatatccagactggaatcagcaagcatccgctttgcatgttgccagacttcgcggcaggcggcggtatcagactcgcggttttgtgtatcccaggtaaagcccgttgccatcacctgaaactcaacgccatgtggctccagcagattgcgttcgccattaggccaggtgcctttaataaactgcacgacgcctactttttttccgtgaccaactgcgcgtgttgccgtaccaaatgccgcggtggttttgccttttccattgccggtaaagacgatgataataccgcgttcatcctgggcctgggccacacgagcatctactttttctttcactcgctgctgacgctgttggtagcgttcatcactcattgggaaattcctggtttacggcccggttgggcgtcaaaggtcatgccggttttacggcggctgtcatcgcccatcagccagaggtagagcggcatgatatcagcgggtgttttaagtttctgtggatcttcggtcgggaaggcgctggcacgcattgcggtgcgcgtaccgcctgggttaatgcagttgacacgcaggcgctgctgatattcatcggccagtacctgcatcatcccttcggtggcaaatttgctcgctgcatatgcaccccagttggctcgtccctgacgtccaacgctactactagtaaagaccagactaccggcgtcgcttttgagtaataaaggaagcagtgcctgggtgagcataaaggtggcattaacgttgacctgcatgacgtcctgccagacctgcggattttgttcgctcattgggcaaacatcgccgagcaatccggcattatgcaaaacaccatccagacgcggataattaacggcaatgcgctgtgccagttgttggcaattttcggacgtgcaggtcagcaaatcgagaataaaccactgtggctgacgcccagtttcttcgtttatgtggctggctacctgacgtaatttttcttcattacggcccaacagaatcactgtcgcaccatagcgtgcatacgtcatcgcggcttcacgaccaataccatcgctggctcccgtcaccaggataatgcgatcattgagtaaatcttgttttggctggtaatgcatggctactcctcaacgacgttgtctgtcgcgctgccagtgtactttatgactttggggctttatgcctgaaacagaagggcatttcaatcagcctggggcgataacaccgcaaaatggatactttgtcatactttcgctgcaataacatctctgcgagacggcttaacatgcctgttgtaaactgtgagccaaagcgttgtttaaccaaggtggggactcgtggaattgttgtctgaatatggtttgtttttggcgaaaatcgttaccgttgtgctagcgattgcggcgattgccgccattattgtcaatgttgctcaacgtaataaacgccagcgtggcgagttacgggtcaacaatctcagcgaacagtataaggagatgaaagaagaactggccgcggcgctgatggacagtcatcagcaaaaacagtggcacaaagcgcagaagaaaaagcataagcaagaagcgaaagcagcaaaagcgaaagccaaactgggcgaggtggcaactgacagtaaaccccgcgtctgggtgctggattttaaaggcagcatggacgcccatgaagtgaacagcctacgtgaagagataacggctgtactcgcagcattcaaaccgcaggatcaggttgtgctccgtctggaaagccctggtggcatggtgcatggttacgggctggcggctagccaactgcagcgtctgcgcgataaaaacattcctttaactgttacggtagacaaagtcgctgccagcggcggttacatgatggcctgtgtggcggacaaaattgtttccgcaccgtttgctattgtgggttccattggcgtggtggcgcaaatgcccaactttaaccgcttcctgaaaagcaaagatattgatatcgaactgcacactgccgggcagtataagcgcacgctgacgttgctgggtgaaaataccgaagaagggcgggagaaattccgcgaagagttgaacgaaacgcatcagttgtttaaagattttgtgaagcgtatgcgtccttctctggatattgaacaggtggcaacgggtgaacactggtacggacaacaggcggtagagaaaggcctggttgatgaaatcaacaccagtgatgaagttattcttagcctgatggaaggccgtgaagtggtcaatgtacgctatatgcagcgtaaacgactcattgaccgattcaccggcagcgcggcagagagcgccgatcgattgttgctacgctggtggcagcggggtcaaaagccattgatgtaaaagacaaacgcgaggctaagacctcgcgttttgctttaatcaaccagatgatatttttcactaagcacatgggccaggtgtttgaacatattaaacaccgcggtgcttttggctgttggcaatccttgttcatctaaaaagtagtcgccggtaaataccagcacgccattacgctgcgtgacgccggtggcttcaatccctgcgagcgtatcctcatgctcacgaatgattttgttggcctctttcaacagcgtttcgcggtcgatgggttgtgtctctttgttcattatttactccttaaacaaggacattagtctacgccaggcatggcttgcagacaaatataccacgctggtggcaagagcgccttactggcaactttggattttgcatgctaataaagttgcgtatcggattttatcaggtacagtgtgacgctttcgtcaatctggcaatagatttgcttgacattcgaccaaaattccgtcgtgctatagcgcctgtaggccaagacctgttaactcagtcacctgaattttcgtgaacagagtcacgacaaggggttgatatccgcagagagcgagtccatatcggtaactcgttgccagtggaaggtttatcaacgtgcgacgcattcctggaagaatcaaattaggtaaggtgaatatgggtaaagctcttgtcatcgttgagtccccggcaaaagccaaaacgatcaacaagtatctgggtagtgactacgtggtgaaatccagcgtcggtcacatccgcgatttgccgaccagtggcagtgctgccaaaaagagtgccgactctacctccaccaagacggctaaaaagcctaaaaaggatgaacgtggcgctctcgtcaaccgtatgggggttgacccgtggcacaattgggaggcgcactatgaagtgttgcctggtaaagagaaggtcgtctctgaactgaaacaactggctgaaaaagccgaccacatctatctcgcaaccgaccttgaccgcgaaggggaagccattgcatggcacctgcgggaagtgattgggggtgatgatgcgcgctatagccgagtggtgtttaacgaaattactaaaaacgcgatccgccaggcatttaacaaaccgggtgagctgaatattgatcgtgttaatgcccagcaggcgcgtcgctttatggaccgcgtggtggggtatatggttagcccgctgctatggaaaaagatcgctcgtggcctgtctgccggtcgtgtgcagagcgtggcggttcgcctggtggtcgagcgtgagcgtgaaattaaagcgttcgtgccggaagagttctgggaagtcgatgccagcacgaccacgccatctggtgaagcgttggcgttacaggtgactcatcagaacgacaaaccgttccgtccggtcaacaaagaacaaactcaggctgcggtaagtctgctggaaaaagcgcgctacagcgtgctggaacgtgaagacaaaccgacaaccagtaaacctggcgctccttttattacctctacgctgcaacaagctgccagcacccgtcttggatttggcgtgaaaaaaaccatgatgatggcgcagcgtttgtatgaagcaggctatatcacttacatgcgtaccgactccactaacctgagtcaggacgcggtaaatatggttcgcggttatatcagcgataattttggtaagaaatatctgccggaaagtccgaatcagtacgccagcaaagaaaacagtcaggaagcgcacgaagcgattcgtccttctgacgtcaatgtgatggcggaaagcctgaaggatatggaagcagatgcgcagaaactgtaccagttaatctggcgtcagttcgttgcctgccagatgaccccagcgaaatatgactccacgacgctgaccgttggtgcgggcgatttccgcctgaaagcacgcggtcgtattttgcgttttgatggctggacaaaagtgatgcctgcgttgcgtaaaggcgatgaagatcgcatcttaccagcagttaataaaggcgatgctctgacgctcgttgaacttacaccagcccagcactttaccaagccgccagcccgtttcagtgaagcaagcctggttaaagagctggaaaaacgcggtatcggtcgtccgtctacctatgcgagcatcattagcaccattcaggatcgtggctacgtgcgagtagaaaatcgtcgtttctatgcggaaaaaatgggcgaaatcgtcaccgatcgccttgaagaaaatttccgcgagttaatgaactacgactttaccgcgcagatggaaaacagcctcgaccaggtggcaaatcacgaagcagagtggaaagctgtactggatcacttcttcagcgatttcacccagcagttagataaagctgaaaaagatccggaagagggtggtatgcgcccgaaccagatggttctgaccagcattgactgcccgacttgtggtcgcaaaatggggattcgcacagcgagcaccggggtattccttggctgttctggctatgcgctgccgccgaaagagcgttgcaaaaccaccattaacctggtgccggaaaacgaagtgctgaacgtgctggaaggcgaagatgctgaaaccaacgcgctgcgcgcaaaacgtcgttgcccgaaatgcggcacggcgatggacagctatctcatcgatccgaaacgtaagttgcatgtctgtggtaataacccaacctgcgacggttacgagatcgaagagggcgaattccgcattaaaggttatgacggcccgatcgttgagtgtgaaaaatgtggctctgaaatgcacctgaaaatggggcgtttcggtaaatacatggcctgcaccaacgaagagtgtaaaaacacacgtaagattttacgtaacggcgaagtggcaccaccgaaagaagatccggtgccattacctgagctgccgtgcgaaaaaagtgatgcttatttcgtgctgcgtgacggtgctgccggtgtgttcctggctgccaacactttcccgaaaagccgtgaaacgcgtgcgccactggtggaagagctttatcgcttccgcgaccgtctgccggaaaaactgcgttatctggccgatgcgccacagcaggatccggaaggtaataagaccatggttcgctttagccgtaaaaccaaacagcaatatgtctctagcgaaaaagacggaaaggcgactggctggagtgcattttatgttgatggcaaatgggttgaaggaaaaaaataacctttaattctgtcaggtttttataaacaaagggtcgcgaaagcggcccttttttattgcatattattttttcttcacacctatacactaaggctataaatgatatagtggttatagttagcaccttttttattattaaatcgtattagtcacccgccaggtgtgacgaaaaaacgatgttctgatggcgtctaagtggatggtttaacatgaaattacaacaacttcgctatattgttgaggtggtcaatcataacctgaatgtcagtagtacagcggaaggactttacacaagtcaacccgggatcagtaaacaagtcagaatgctggaagacgagctaggcattcaaattttttcccgaagcggcaagcacctgacgcaggtaacgccagcagggcaagaaataattcgtatcgctcgcgaagtcctgagcaaagtcgatgccataaaaagcgttgccggagagcacacctggccggataaaggtagtctgtatatcgccaccacgcatacccaggcacgctacgcattaccaaacgtcatcaaaggctttattgagcgttatcctcgcgtttctttgcatatgcaccagggcagcccgacacaaattgctgatgccgtctctaaaggcaatgctgatttcgctatcgccacagaagcgctgcatctgtatgaagatttagtgatgttaccgtgctaccactggaatcgggctattgtagtcactccggatcacccgctggcaggcaaaaaagccattaccattgaagaactggcgcaatatccgttggtgacatataccttcggctttaccggacgtagtgaactggatactgcctttaatcgcgcagggttaacgccgcgtatcgttttcacggcaacggatgctgacgtcattaaaacttacgtccggttagggctgggggtaggggtcattgccagcatggcggtggatccggtcgccgatcccgaccttgtgcgtgttgatgctcacgatatcttcagccacagtacaaccaaaattggttttcgccgtagtactttcttgcgcagttatatgtatgatttcattcagcgttttgcaccgcatttaacgcgtgatgtcgttgatgcggctgtcgcattgcgctctaatgaagaaattgaggtcatgtttaaagatataaaactgccggaaaaataatttcttgcgttattttcggcaccttttatgtagcgaaggtgccggaatatattctcttttgttacttatttctataccgtgcacaatatttttatccctcatatttatagggtaaattacctgtaaagtagtgtctaattacccgcctcgcaaactccagttttcaaatatctatttcaggtcaaaagattgaattattcactggagacgattcgtaaattcgctggatttttgactaaagtttctttaggatttgtctcatcgtatgattaattacaccaatcgttcaacgtcttgctgataagtgatggcgattatatgaggttagcaatgccttctggaaatcaggaaccccgccgcgatcctgaattaaaacgtaaagcctggctggcggtttttcttggttctgcacttttctgggtggttgtcgcactgctgatttggaaagtgtggggataactatggtcggtcaggagcaactggagtcgtcaccattatgccagcatagtgacaatgaaacagaaacgaaacgggaatgttccgtcgttattccagacgactggcaactaacatcgcagcagcaagcctttatagaactgtttgctgaagatgatcagccgaaacaataattatcatcattcttattacccatttttaatgaattaaagggcttttaatacaccgcagcaataacagcttgagttatctcaacacaaaataataaccgttaagggtgtagcctatgatcaacacaaatatgaaatattggtcctggatgggcgcgttttctctgtcgatgctcttctgggccgaactcctctggatcattactcactgatccttgaccccgctgcggcggggttgtcatttgctttgccacaaggtttctcctcttttatcaatttgggttgttatcaaatcgttacgcgatgtttgtgttatctttaatattcaccctgaagagaatcagggcttcgcaaccctgtcattaaggaggagctatgagcagtaccctacgagaagccagtaaggacacgttgcaggccaaagataaaacttaccactactacagcctgccgcttgctgctaaaagtctgggcgatatcacccgtctacccaagagtctcaaagttttgctcgaaaacctgctgcgctggcaggatggtaacagcgttaccgaagaggatatccacgcgctggcaggatggctgaaaaatgcccatgctgaccgtgaaattgcctaccgcccggcaagggtgctgatgcaggactttaccggcgtacctgccgttgttgatctggcggcaatgcgcgaagcggttaaacgcctcggcggcgatactgcaaaggttaacccgctcagtccggtcgacctggtcattgaccacagcgtgaccgtcgatcgttttggtgatgatgaggcatttgaagaaaacgtacgcctggaaatggagcgcaaccacgaacgttatgtgttcctgaaatggggaaagcaagcgttcagtcggtttagcgtcgtgccgccaggcacaggcatttgccatcaggttaacctcgaatatctcggcaaagcagtgtggagtgaattgcaggacggtgaatggattgcttatccggatacactcgttggtactgacagccacaccaccatgatcaacggccttggcgtgctggggtggggcgttggtgggatcgaagcagaagccgcaatgttaggccagccggtttccatgcttatcccggatgtagtgggcttcaaacttaccggaaaattacgtgaaggtattaccgccacagacctggttctcactgttacccaaatgctgcgcaaacatggcgtggtggggaaattcgtcgaattttatggtgatggtctggatagtctaccgttggcggatcgcgccaccattgccaatatgagcccagaatatggtgccacctgtggcttcttcccaatcgatgctgtaaccctcgattacatgcgtttaagcgggcgcagcgaagatcaggtcgagttggtcgaaaaatatgccaaagcgcagggcatgtggcgtaacccgggcgatgaaccaatttttaccagtacgttagaactggatatgaatgacgttgaagcgagcctggcagggcctaaacgcccacaggatcgcgttgcactgcccgatgtaccaaaagcatttgccgccagtaacgaactggaagtgaatgccacgcataaagatcgccagccggtcgattatgttatgaacggacatcagtatcagttacctgatggcgctgtggtcattgctgcgataaccagctgcaccaacacctctaacccaagtgtgctgatggccgcaggcttgctggcgaaaaaagccgtaactctgggcctcaagcggcaaccatgggtcaaagcgagcctggcaccgggtagcaaagtcgtttctgattatctggcaaaagcgaaactgacaccgtatctcgacgaactggggtttaaccttgtgggatacggttgtaccacctgtattggtaactctgggccgctgcccgatcctatcgaaacggcaatcaaaaaaagcgatttaaccgtcggtgcggtgctgtccggcaaccgtaactttgaaggccgtatccatccgctggttaaaactaactggctggccagcccgccgctggtggttgcctatgcgctggcgggaaatatgaatatcaacctggcttctgagcctatcggccatgatcgcaaaggcgatccggtttatctgaaagatatctggccaagcgcacaagaaattgcccgtgcggtagaacaagtctccacagaaatgttccgcaaagagtacgcagaagtttttgaaggcacagcagagtggaagggaattaacgtcacacgatccgatacctacggttggcaggaggacagtacctatattcgcttaagccctttctttgatgaaatgcaggcaacaccagcaccagtggaagatattcacggtgcgcggatcctcgcaatgctgggggatagtgtcaccactgaccatatctctccggcgggcagtattaagcccgacagcccagcgggtcgatatctacaaggtcggggtgttgagcgaaaagactttaactcctacggtagccggcgtggtaaccatgaagtgatgatgcgcggcaccttcgccaatattcgcatccgtaatgaaatggtgcctggcgttgaaggggggatgacgcggcatttacctgacagcgacgtagtctctatttatgatgctgcgatgcgctataagcaggagcaaacgccgctggcggtgattgccgggaaagagtatggaagtggctccagtcgtgactgggcggcaaaaggtccgcgtctgcttggtattcgtgtggtgattgccgaaagctttgaacgaattcaccgtagcaatttaattggcatgggcatcctgccgctggaatttccgcaaggcgtaacgcgtaaaacgttagggctaaccggggaagagaagattgatattggcgatctgcaaaacctacaacccggcgcgacggttccggtgacgcttacgcgcgcggatggtagccaggaagtcgtaccctgccgttgtcgtatcgacaccgcgacggagttgacctactaccagaacgacggcattttgcattatgtcattcgtaatatgttgaagtaacaactatttgcttgccggttattttgcttccggcaagcaaatgaattacacaatgcaagagggttatttgttcagcaaatggcccattttctcggctttggtatcgagataatgttcgttattggggttacgacctacaatcaatggtacgcgttcaacaatattaatccctgcttcggtcagaatttcgacttttttcgggttattggttaacaagcggacttcattgacgccaaggagtttgaacatatcagcgcaaagagtgaagtcgcgctcatcagcggcgaagcctaactggtggttagcctctacggtatcgtaaccttgatcctgcagtgcgtaagcgcggattttattcagcagaccaatgttacgaccttcctgacggtgatacagcaaaataccacggccttcctcggcaatttgcgtcaatgccgcttcgagctggaagccacaatcgcagcgcaagctgaacagggcgtcaccggtcagacattcggaatggacgcgcgcaagtaccggggtatgcccggaaatatcgccatagactagcgcgacatgatcgtgtccggttgccagttcttcaaatcccaccatcaggaaatcgccccatggggttggcagtttggcttctgccacacgtttaagctgcatgaaattctccagataatgctggttctgtattggcttattttgccataacgagaaggggttcacctaatcacgacgcgtcgatcgttcacggaatggcacaaatctgtcaatttttcctggaactggcgttttcagttatgattgtgggacttatcaaaaaggagaggccatgcgtagcattgccagacgtaccgcagtgggagctgcactattgcttgtcatgccagtagccgtatggatttctggctggcgttggcaacctggagaacaaagttggctactaaaagcggctttttgggttactgaaactgtcacccagccctggggcgtcattacacatttgattttattcggctggtttctctggtgtctgcgttttcgcattaaggctgcctttgtattatttgccattctggcggccgcaatccttgtgggacaaggcgttaaatcctggatcaaagacaaagtccaggaaccacgaccttttgttatctggctggaaaaaacacatcatattccggttgatgagttctacactttaaagcgagcagaacgcggaaatctagtgaaagaacagttggctgaagagaaaaatatcccacaatatttgcgtagtcactggcagaaagagacggggtttgcctttccttccggtcacacgatgtttgctgccagttgggcactgctggccgttggtttgctgtggccgcgtcggcgaacgttaaccattgctatcttgctggtctgggcaacgggagtcatgggaagccgcctgctgctcgggatgcattggccacgcgatctggtagtagctacgttgattagctgggcgctggtggcggtggcaacgtggcttgcgcaacgaatttgtgggccattaacaccacctgcggaagaaaatcgcgaaatagcgcaacgagaacaagaaagttaacgctggttgattttccgaatttagcccttaaatcatcaacaatgcgtgtggatgccatttcgcagacggcgcgaaaatggtactttaaagggctattgcggtaagttgaccataatttattcgctctaaccacataacgggaagtaatgtgaaatatttactcattttcttactggtgttagcgatcttcgtgattagcgtcacgttgggtgcgcagaacgatcaacaggtgacgtttaattatctgttagcgcaaggggagtaccgtatttccacattgctggcggtattgtttgctgcggggtttgctatcggttggttgatttgtggcctgttctggctgcgagttcgtgtttccctggcgcgcgctgaacgtaaaataaagcgactggaaaaccagcttagtcccgcgactgacgtggctgtagtgccgcacagcagtgcggcgaaggaataactttctatgctggagttgttgtttctgcttttgcctgtagccgctgcctatggctggtatatgggccgcagaagtgcgcaacaaaacaagcaagatgaagccaaccgcttgagccgtgattacgtagcgggggttaacttcctgcttagtaatcaacaggataaagcggtagacctgtttctcgatatgcttaaagaggatacaggcaccgttgaagcccaccttacgctcggaaacctgttccgtagccgtggcgaagttgatcgcgctattcgcatccatcagaccctaatggaaagcgccagcctgacctatgaacagcgtctgttggcgattcaacaactggggcgtgattacatggccgccgggttatatgaccgcgcggaagacatgttcaatcagctgaccgatgaaactgacttccgcattggcgcgctgcaacagttgctacaaatctaccaggctaccagtgagtggcagaaagcaattgatgttgccgaacgcctggtgaagctgggtaaagataaacagcgcgtcgaaattgcccatttctactgtgagttagccctgcagcatatggccagcgacgatctcgatcgtgccatgaccttgctaaaaaaaggggcggcggcagataaaaacagcgcccgcgtatccataatgatgggacgcgtgtttatggcgaaaggagaatacgccaaagccgtcgaaagtctgcaacgcgtgatatcccaggacagagaactggtcagcgaaacgctggaaatgttgcaaacctgctatcagcagttgggtaaaactgccgaatgggcagaattcctgcagcgtgcggtggaagagaacaccggtgccgatgctgaattgatgcttgctgatatcatcgaagcgcgcgacggtagtgaggccgcacaggtctatattacgcgccagcttcagcgtcatccgaccatgcgtgtgttccataagttaatggattaccacttaaatgaagcggaagaagggcgtgccaaagagagcctgatggtgctgcgtgacatggttggcgagaaggtacgtagtaagcctcgttatcgttgccagaaatgtggttttaccgcatacaccctctactggcattgtccgtcttgtcgggcctggagtaccattaaaccgattcgcggtcttgatggcctgtaatttttaaaaaaaatccgactttagttacaacatactaattattaatgttccattgtgctccggcaacgacggcgcagaaaaagcctgccaggggagaaatcgcaactgttaattttttatttccacgggtagaatgctcgccgtttacctgtttcgcgccacttccggtgcccatcatcaagaaggtctggtcatgacgttaactgctagttcttcttcccgcgctgttacgaattctcctgtggttgttgcccttgattatcataatcgtgatgacgcgctggcctttgtcgacaagatcgacccacgcgattgtcgtctgaaggtcggcaaagagatgtttacattgtttgggccacagtttgtgcgcgaacttcaacagcgtggttttgatatctttcttgacctgaaattccacgatatccccaacactgcagcgcacgctgtcgctgctgcagctgacttaggcgtgtggatggtgaatgttcatgcctctggtggggcgcgtatgatgaccgcagcgcgtgaggcactggttccgtttggcaaagatgcaccgcttttgattgctgtgacagtgttgaccagcatggaagccagcgacctggtcgatcttggcatgacactgagtcctgcagattatgcagaacgtctggcggcactgacgcaaaaatgtggccttgatggtgtggtgtgttctgctcaggaagctgtgcgctttaaacaggtattcggtcaggagttcaaactggttacgccgggcattcgtccgcaggggagtgaagctggtgaccagcgccgcattatgacgccagaacaggcgttgagcgctggtgttgattatatggtgattggtcgcccggtaacgcaaagcgtagatccagcgcagacgctgaaagcgatcaacgcctctttacagcggagtgcatgatgagtgattccaacagccgtctggtctacagtacggaaaccggacgtattgatgagtccaaagcggcccctgtacgccctaaaggcgacggtgtggtgcgtattcagcgtcagaccagtggacgtaaaggtaagggcgtttgcctgattaccggtgtcgatctcgatgatgccgaactgacaaaacttgcagcggaactgaagaaaaaatgcggctgcggcggagcagttaaagatggagttattgaaatccagggcgataagcgtgatttattaaaaagtctacttgaagcgaaagggatgaaggtaaaactcgcaggcggttaacataaaaagccacggatatatccgtggctttcgaatattttactgtgcgtattattcagttatttcgtactgaacagaatcaagcgtattataattgcgagtcgataatcgacatttatttacgattatttaccgacctggtgaccaataacacctccgacagctgcaccacctaatgtacccaacgtactgccatcggtcagtactgcaccgcctaatgcccctgcacccgcgccgattgcggtgttgcggtcccgtttagaccagttagaacaggcactcagagacattgccaaagtaattgccagaacagccgcggtcatttttttgctcgttacaaacataatactctctcctgaatttatgattcacggaagtaagctctctataactataatagctaagaataagtctggtgaaattattccgtgaaatctgctcgcgcgcagggttatatcacgcaggtgataatgacttcctgttatatcgctgataataattttatatcttgagagtgttaataacaggtaaatagtcttaattatcaaccaggaatcatcttagagcggatgatttgccaaactgcaaatcatccgtagagaagggaaatggttaaatgtcaacgacgtgaatggtgagtttactgtgctcaagatgcatcagatcgctggcgcgtattttgctatcggtaatcacgcgattgaatcgctcaacgggaccgatggagtaactatgtacagcaccaaatttgctgctgtcagtcaggactatcgcttcgcactctttttccagcacggcattgaccacatcggtacgcatcatatcgcgaccggtaaatccagtttcaggttgccagccatcaataccaataaatgctttgctgaaatgcacctgttggatgcactggcgtgtcaaagggccaaccatactttcgctttttttctgatacacgccaccgagcaaaataacttcacaaggcgcgtctttcagcaaatgcgcgatgtagctgctgaccgtgatgatagtgacatttttcttctgctcgcccagagtccgggcgagtagggcattgctgctgccattttcgataaagatggtttcgcccggttgaaccaggctcgcggcaaactcggcgagttcacgcttcagcgtatagttgctcatcatacgggtttcgacgtcatcactatcaaggctaacagcaaagccatgtgcacggcggaggtaactcagtttttcgagtgtgttgagatcctggcgaatggtaacttcagaaactccagtggcttttgccagatcggttacgctaacctgaccctggtcaatgaccatctgtagaatagtttgttgtcgggaattcatcgctgtaattcttataacgttataatacttaataaaaaaatactgacgcgccgggcatcctcaaataggaaaacctgaaggcacgattgttaaatctcccacggtgccttcgggatgtctggcgtagattcagcaacctggcgcaagagttctgctttaagtatctcgagattatggatcgcagagtggtaatcgcctgccacaaggatatctaacacaatatcaatacgttcggcaacgcgctgggcatcaaattcagacatcaaggacatccttatagcaaaagggggaaaatgaataatgcaaaaattgccgctaaaagagaagtgtttaacagcaacggctaattatcatccaggaatacgatatataatgacgggatatagcgctaagtatatatattcatctacttatgcgcgcttcagatagcgtttataccagcgttcgaaggcgacggcgggcatcggtttggcaaacaaaaatccttgccgctcattgatcccgttcttggttaaaaaagcatcttcctttgcactctctacaccttcggcgatcacctgaagattcaatgcctgggccacagcgacgatcgcccggaccagactctggctgacaggttgtttgtgaatatctcgaacaaaaacctggtcaagtttgatggcatcgatcggaaagcgcgccagttggctaagactagagtagccggtaccaaaatcatccagatgcacttgcgcacctagttggctaaattgttgaataacagacagtgccagttcatcattctcaatcagacaactctctgtcagttcaacatctatagggcagtattcaaaattgagttcctggagaacctgtttcagggcggtgaaaatggtttgatcggcgagctgacgtgcagaaatatttaccgccactcgcaggtttatgcctttatcccgccactttgccacctggcgtacgacatcgagaatcacccaacggcctaaaggcacaattagcccactctcttcggcgtaggaaatgaagtccaacggtggaatcaacccacgttcaggactctgccaacgtactagtgcttccagactgcgcacttcgccacgccaggtgattttcggttgatagtgaataaccaactgatcgttttccagtgctttacgcaagttggtatccagccagagatattcaaatacccgttgattcatttctggggtaaaaacgcaaaattgtcctcgtccgccttccttcgctgtgtacattgctgtgtcggcgtgacgaataatagccgtgctgtcactaccatgttcgggagagagtgcaatacctacactacagctggtataaacttcaattaaaccaatgcgaaaggggagccgtaagcgggtcaaaattcgacttgccattgcttccagcgcgctttgactggtgttggatgccagtaccagaaactcatccccacctggacgagccaacacctggtcatgttcgagacagcttaaaatagccaaactcacgtcgcgtaataactggtcaccaaacaaatgcccataggcgtcgttgacctttttgaaattatccaaatcaagatacacaaccccaactttattgttatctgcatgattaatagcgtgatcgattaaatcctgcattgcgttacgattcggcagtccggtgatactgtcggtatttgccagaatacgcagtcgctcctgagcgcggcgctcttcggtaatgtcggtgccggaacagattaaaaaaatctcgtttttgccactgccgctgtggacaaatttattgcgaaacagaaacagccgctggcctttacatgttggtatccacagttcgacttcatatgcattgccgcttcgaaaaaatacacggttattgcgcctggatgccgcagcttcacgacggctcataaacagtttaaacacgctttgcccaatgacgtcgtgttctttcaaccctgtgtaatcttcacataaccgattgaagcgttggatattcccccggctgtcgagaatcactattgcggaatgtgcttcagaaactacctgctcagcaaaggaaagcccgtgacttaaatcacgagcaaccgccggtgtgtcatgccatgcagacgcgttgccagcccattcccgtttattgatttttcgtcctaccagatgcacagaaagatcgctttcatcgacggtcagactcatcatcaggctggaggtgatgaccgtcatttccctgatgcgagcagcctgttcggcagataactgcaatgtacgatcaggttctgtggtttcggtggtagaaaagcgcaaaacatcgctgctttccgtcaaccgccagtatggattgtggcttccgagaaagttgtacaacgttgtggactccctaacggttttcatgatgcatatcctccggttaacagcggagtccgcggttaaataaaaggaacaacatgacttacatgaaattaacggcggctaaacgcattgttttttttatatatttatttgtaatccagttttggaaaaacgccagttttcaaacgaaagtcagttaaaaaatctgcctggatataacgaaggtagagcggggaaataaacggcccatccatgaggaatgggccgtgaaaggagattacgcgaccgggcgcgcaataatgctgcgggtttccatgcggacttcggcaatagtgacgtcaataacgtcagtcactttgtaaaccgtttcacctttaatttgtacagtgccgttttcctggctgcaaaccagttcatcgcgcacagcgtgtaagaaaggtgccggaataaaggcgatagcgccgttatcaaccaaacgaacacgcatgccgccacggctgatatcgacaatttccgctgcgaaacgggtgtcggtcccggctttgtctttcaggaagcgtgcgtataaccagtcaccaacatcacgttctgccatccggttgagacggcgacgctcggccatttggacagtgatttcatcctgtgggcgcgtcgcagtttcgcctttgataaccgctttcagcagacggtggttgatcatgtcgccatatttacggatcgggctagtccaggtggcgtatgcttccagaccgaggccaaagtgaggaccgggttcagtgctaatttcagcaaaactctggaagcgacgaatgcggctgtcgaggaaaccagttggttgcgcgtccagttcacgacgcagtttgcagaaaccgtccagcgtgagcacttcttcggcatcgacatgcagaccgtgcgttttcagcaacgctgccagcgcgtcggcattcgccggatcaaagcccatatgcacgttatagatgccaaaaccgagcttatcgcgcagtacgcgggccgcacaaatgttagcggcaatcatcgcttcttcgacgatacggttggcaatgcgacgaggctcggcgacgatatccagcacttcacctttttcaccgagaataaagcggtaatccgggcgatctttaaacaccagtgcgtggttatgacgccactcgccgcggcgttggcaaatttgcgctagcaaacggacttgttcggcaattgcttcactttcaggctgccagtcaccggtattttccagccagtcagaaacctggtcatacaccagctttgctttggattcgatggtggcggcaaagaattcgatattatcttcaatggtgccatcagcggagagcgtcatgcggcatgccagtaccgggcggacttcattggcgcgcagactgcagagatcgtcagaaagctcgcgaggcagcatagggatgttgaagccaggcagatagttggtgaatgcgcgaattttcgcggctttgtccagcttgctgccttcagcaatccacgcggttggatcggcaatcgccacaatcagctgaagtttgtcatccggcaacgccttagcgaaaagggcgtcatccatatcttctgtgctggcactgtcgatggtgacaaaatccagcgcggtcagatcttcacgaaccagaccttcatcgagcatttcggtagcgacgccgtctggtgcttctttttccagattatggcgtgcaagggtaacccaccacggtacaaagtgatcgtcaccaaaagtgatgtattgtgtcagttctgcatagaaagaacgatcgcctttcagcggatgacggcgcatttcggcaaccgcccagtcgccttctttaaactcgtggttcaggccacgggctgcgcggcaaggaatggcgtcttttaagagtggatgatcaggaacgatggccagacggtcatttttgccctgaaccttacccacgaaacgagtcaggaacggttcaaccagttcttctggctctgcggattcacgttctttttcactgtggatcaccgcgataattcggtcgccatgcatgacttttttcatctgcggcggcggaatgaaataacttttttgcgcgtcgacttccaggaagccaaagcctttttctgtggcttttaccaccccttcagcgcgtggcgtctgggaatgcagttgctgtttaagctgcgctagcagcgggttgtcctgaaacataattgtctattttggtggccattagagcggctgacagttttacgcgaatctgtctgacgcggcaaggttaatatgtctcacccaacgcgatttttaagcgatttatccagccacacagcccgctccataccagcagattaataatctgcgtactacttttttcgtgttcgagtaaagggctgaactgggcggcgctaaagcgatcgggtgctcgggtcagccattgtatcgcctgaacggtagcgcgctcaacagaatgacggtcagcccattggttaatttcattttcgcccttgcgcataagggtgctgatttttttatattcattactactatccatacaggtggcaaaacaagcaggactgccatttatacgcgcgcataacaacgccgcaagctgattatccggctgtgtattgccccgtgtgctgtttaacaacttttcgagaagggaaagactaatagggtggagagagagtatttcggccagttggcaaagttctgcagtactactttttgtgtgctcttcaggtagtttttccacctcatagctgcttcgccagcgtaaactttcatcagcaaacagactcgcgtcggcgtagttttgtatctccagcccgggtaaccagcgtaccggatgcccgagataagcctgaaatgtcgcaattgtccgcgcctgaaagccaataaaaccaatgatttggctaatgatcacacagtcccaggcagtaagaccgacgtcattcagatgctggcggcttcggttgtcgataatagaagggctgctagccagttggcgggcatattgcgtgatttgtgccaaccgatgattactttccctggtggaatcaggcccggggagcggcgtaagtcgcgcgctatagtagttacataaccgctggacgccgcaaacctgagcaaccgtcagggccgtgctcaagcgttcataagcggtgaaggtctgactacgggtcacggtaagctggtcagggaacaaatccactgcaagaacacgcgcagggtccagccaactaaggaagggggccagcgtttctttttcaaggatcacgtcgagtagaaagggatcgctgacctttgcggcttccgggaccagaggcagaacgtcatactccgtagtactggattgcgtttcatgataccagtggcttttgccggtgatgtggcgttgttccatgggcgctccttggtcgtaaaggaaatcgttatcctgacgcaaggcgggaaggggagaaagacggatcggcgataacaaatatcagaaaggtataacagagataacgggcggcagaacgccgcccatctttaccaacagaacgattatttcagttcgagttcgttcattgcagcaatgctgaaaccgccgtcaacgtggaccacttcaccggagataccggcagagagatcggagcacaggaatgccgcagagttacccacatcttcaatagtaacggtacggcgaatcggggtaacggcttcgcaatgagccagcattttgcggaagtctttgataccggaggccgccagagtacggatcggaccagcagagatggcgttaacacgcacaccttccggacccatcgcgttcgccatatagcgcacgttcgcttccagagacgcttttgccagacccataacgttgtagttcgggatagcgcgctcagcgccaaggtaggaaagggtcagcagggcagaacccggattcagcatggagcggcaagcttttgccattgcaacgaagctgtaggagctgatgtcgtgggcaattttgaagccttcacgggtaacggcgttaacatagtcaccatccagctgatcgccaggtgcaaaaccaatagagtgtacgaaaccgtcaaatttcggccaaactttccccagttcagcgaacatggtgtcgatgctggcatcttctgcaacatcgcactgcagaacgatgtcagaacccaattgagcggcaaattcttctacgcggcctttcagtttgtcgttctggtaggtgaatgccagttcagctccttcgcggtgcatcgcctgagcgataccgtaggcgatggatagtttgctggcaacaccggttaccagaatgcgcttaccggaaagaaaacccatagctttaatccttattgttgatgcttgttgtgcctgaaaatcaggcgattcgtcgttttagtaaacagtacgaacagataaacggttattataatcaacctggctgtgagtagctatagttgccaggtccgaccggagcaggctgcggcagggggggcgcttttcccctcaccctaaccctctccccagaggggcgaggggaccgtattgtgcaaatattgttaccccagcaacaaacaggctcatacagcccctaaccctttcatggcgatggctgggacggttcagaccttgccgaatattctccagcaccgtctccatgttttcaccacaacagctattcggctcggtctgccccctcgctctttcagggagagggactccggcggttcagttcctgcagaatattctccagcaccgtctcctcattacaatcaatctcgttattccagaaacgcagcacggtccagccctggctctcaagccagctagtgcgcctggaatcataggcaactgctaaatcatgctgcccaccatccagctcaacgactacacgcgcgctgcagcaagcaaaatcgagaatgtagctccccactggatgttgacggcgaaatttgaaatcactaaaacgtcggctgcgaagatatcgccagagctttcgttcctgcaaagtgagattgcgtcttaaatcacgcgcattacttttaattttatctatcacctcattctgacaagatttaatcttttgtcagaatgaggtgaataatctggaaggaggattcagaaaattagcgatctttacgccacgcatccgccgtcaatgcctcgccaaaatgaccggcaatcagccgtttggtgagttcatgcagcgggcttgccagcacatccgcggtgctgcctcgctcgacaacctcgccctgatgcatcaccagcacctggtcgctaatgtgcttcatcattccgatatgctgggtaacataaatatagctaatgccctgtttttcctgtaattccagcatcagattaatcaactggctacgcatgctcatatccagactagcgagggcttcatcggcaataatgacttttgggcgcaatatcagcgcgcgcgccagacccagacgctgtttttgtccgggtgccaacatatgcggatagtaactgacgtgatccggtagcagcccaaccatacgcatcgtttcaataatctgtttgcgacgctgttccggttccaggtcggtgttcaggcgcagtggaaaatccagaatttggctgatacgttgacggggattcaagctggtgctaggatcctgaaaaatcatgcgaatacgctgactgcggaaggaataatcgccaaaatgcagtggatgatcgtcaatcaataactcgccgctggtaggctctatcattcccgccagcatttttgccagcgtggatttaccgctaccattctcgccaataatcgccagtgtctggccttcacgtagcgtaaagctcaagggttttaccgcttctacggtctgacgacgaaaccagccggtccggtagcggaacgttttacttaaattacgcacttcaagcagcgtttcgatcatctcactctttctccatgttcagcgggaaatgacaggcatagagatgatttttcgcccccgtcaaacgtggcgtcacaatgcattctcgttgtgcatacgggcaacgtggccccagacgacaaccaatcggtaactgttccagcagtgggatagcgccgggcagcgtattgaggcgacttttatgcggcatcgcgctgccgaagtctggtatcgcgcggatcagcgcctgggtataaggatgatgtggcatcgtcaccaactccttactcggcgcggtttccactgtttgaccgcagtaaagcacgttaattttatccgcccattggctaagcatttgtaagtcatggctgataagcaaaatagtggtattgctgttttggttgagacgcgtcagcaggcgaaagatttgcgcctgggttgttggctccatactgttggtcggttcgtcagcaatcagcagacgcggttgattcgccagtgcaatggctatcatcactttctgacattcaccttcggtcaactcatagggaaaactgcgcatcgcatctttgtgatctttaatccccacgcggtgcagcagttcaatggcacggcgtttgcgccagccaaaacgctgccaccaacggcctttataggtccaggctgggatgttttgcatcaactggcggcccacacgttcactagggtcaagacagctctgcggttcctggaaaatcatgctcacgttatggccaaccagtttgcgccgttcgcgtgcggagagacgcagcaaatcgatatcatcaaaacgcatacggtcagcagtaacacgccagttatctttattcaccccacaaatcgctttcgcaatcaaactcttgccggaaccggattcaccaacaagaccgcggatttcaccttcggttaaggtcatacttacccggtcgacggctttaacccactcatcaccggttttaaattcaatggtcaggttacgaatatcgagtaatggcattattccacccccgcaataatcgcacgacgaacgccatcgccaaggaggttaaccaacaacacgctaatcataattgccgcacctggcagcatgacagtccacggggcgacataaatcagttccagcgcatcaccgagcatcgctccccattcagggctggggagttgtgcgccgagatcgagaaagcccagcgcggcgatatcgagaattgccatgctcagtgcgcgggtgatctcggtgaccagcccggcggtgatgtttggcatcacagcaaaccagagaatattcagcgtacttgcgccatccagacgggcggcgataacgtactctttttccagttcgtcatgcaccatgctgtaaatgctacgtaccatacgcggcagcaatgccagccagacagcaaacatagcgtgggacaaactcggtccggcaaacgctacaacgataattgccaacagcaggctagggatcgccagtaaggtatccagaatatggttaagcaccgcactgcggaggccgtgtgtcgccccggcgaaggtgcccagtaccaggccacagatcgtcgcggcaagcgtcaccacaaatgcgccacccacggttggcgcagctccgctcagtaaacggcttaaaacatcgcgtccgaggtcgtcagtccccaggaagaaagaaacttcgccatagcggctccaactcggcggcaataattgataaccgagaaattgctggtcgatgccgtaaggcgcaaaccagccgccaaaaatacacagtacagccagccccgcgcagccgtacaggccgaccatcgcagaggcgtcactataaaatttgcgccaggcggtacgcagcgtgcccggcgggcgcttttcgctgtatacgctatcgtaaggcataccattccttatgtttcagattatttatcgtaaggcataccattccttatgtttcagagggttagccatggcacccaaaatatcagaaatcacgttaacaataatgaccagactgccacacaccatcactccggcggaaatggctgcgtaatcctgctggcggatggcgttaattaaccagcgccctaaacccggccagctaaaaaccatttcggtgatcatcgccagcgtcagcatggtggaaaactgtaagcccaggcgaggaataaccggcggtaacgcgttatgcagaacgtggcgacgcaaaatagtaaagcggctcaaaccgcgggtcgccgccgcttttacatagttctggtcatacacttcgatagtgctgatacgcatcaggcggatcacttcagttgttggcgcaacgctcagggtgatcacgggcaatatcatatggcggattgcgctcatgatcatttcatcccgccatggactgtcgctaagccaggcatcaatcaacgcaaaaccggtaatcggtttcacttcgtagagcagatcgaaacgcccactaacgggcaaccaacctagcgtgagactacaaaacagcgtcaacagaagcgccagccagaacaccgggatactaaagcccagtaaggcgatggcgttgatcaagttatcctgccacttatggcgcgtaatcccggcaatcatccccacggggatgccaacaatcagcgcaaaaccgaaggcgaggatgcacagttccatcgtcgccgggaagacctcttttaactgttcggcaatcggttgaccgttaatgctggaaacaccaaaatcccagtggatcaggccgttaaaccagaacacccaggcattccacagactcgcgccttgtaacggcgcatgaggggtgaaatagctcaagctgaagccaacgaaggtcagcaggaacaaggtgacaatcaataacaaaatgcggcgtaaggtgaagataatcatggttttttcacctcatcctgtttctcgcgatacaccccagcaaaggaggcgttaccaaacgggctaagtaccagacctttgatatcgtaccgataggcctgcaaacgcaaactgctcgccagcggcaaaatgggcaattcctgcgccagaatactctgcgcttcgtcataggcttcaatacgcgccgccagctgctggctagagagcgccttacgcaatacgctgtcgaatttcggatcgcaccagtgggcgaggttggtctggctatgaattgccgcgcagctcagtaacggacggaagaaactgtccgggtcgttactgtccgtcgcccaaccggataacgtcagatcatggctcatatccatcaaccgcgcctcctgaaagcgaccttctaccggcacaatcaccacttttacgccaacctgcgccatatccgcctgaatcagttcggcagttttcagtggactggggttccacgcctggctacgtgtgggcacccacagtttcagcgttaaattttccagccccaagctcttcaactgttcgcggcttttcgccggattgtattcagtaattttagcctcgttgtcataggcccagctggcgcgcggtaaaatagaggccgccgtttcagccgtaccataatagatggattgcatcaggcgctggttattaatcgccagtgccagcgcatggcggacagcgggattatttagcggcggtttggcggtgttaaatgccagataggcgacgttcatcccaggacgcagcgttaaacgcaagcgcgggtcgtcacgcaaaatggatagctggctggcagcaggccaggccagaacgtcgcattccccggtcaggagtttgctcagacgtccggtgccgccggagcctaaatccaccactacctgcggcattaacggtttaccgcgccagaagtcatcatgacgttgtaggcgaataaattgcccggcgcggtattcgctcaactgatacggaccggtgccgaccggttgacggtcgagttgctcctggcgatcttctttctctaacttccgggcatattctgcgctcatgacgctagcataatgggttgcgaggtgccacaaaaaagaagcatccggctgggcgagtcggaactcaacggtatgattatccagtttgcggacgcttttcacgttatcggcaaattgcaggctgtcgaagtaggggaagttgctgccgttgacgttatgccacgggttgttgcggtcaaaaattcgctggaaggtaaacaccacatcgtcggcattcattttacgagtgggagtaaaccagtcggttttttgaaacggaacatcgcgacgcaggtggaagcgataggtcgcgccgttgtcgagtacttcccagctttcggcaagttccggcatcaggcgataggtatagggatcgacatccagcagtcgatcataaaactgggcggcaagggtatcgacaattaacccactgctcgctttggatgggttaaaggtgttgacttgcccgctgacgcaatagacaaaaccgctgtcgcggatatcagcatgcgggggagattcaggcgcggcgattgcctgaccactcacaagtccagcaatcaccaaaagagagcttaatacctggcgcataatattaagggattttatgtaaagaggctatcttactaatatttaatgacatttgccattaccgtttgtgttcaggggtcgtaatgagggccgtgtggttggtcgttgaacaggtgacgtcgccatctgttcaacattcgtacccgtgatttctctataactataactcacagaacaacttagcgaggagcagagcggtacgatcgtgagaaacccattaaagcacgctgcagtgcgtgtcattgttagccagatgcggcgtgaacgctttatccggacaacgatactgaccgatcgtctgcaattaaatcattactcattaccccattgattcaaaaactctgcgatctcatcaatgcgtacgggattaatccccgcttcagcagccatttcatgttgggcttcttcgctgatctcttcattgttcatcaaacgggtgagcagtaactggaagtagtgggccagcggtgtgcgttcagcctctgcgacaggctctgcgcattcggtcgcgtactcatcggcaatatcaaaatattttagcgggatatcgtggttcattatttgcccctggggttaatgcgctaagcataagggcggatgatagcactcgtgatccgggtcatacatctttttatagttaatggcgcggcgcgttaccctcaggcaggataatgcgccgcgcatccgactattacgtttcactcaccggcgttctgtcaccatcatacaacggcactttgcgatagcggcggatcagataccataaatatgcgccgcctaagctagcccataccagaccgagtgtcagactcgtactctcgaggttaacccacagcacacccaccgtcagcgcgccaaccagcggcatcagcaaatagtggaagtgatccttccagcttttattcattcctttacgccgccagaaatgattaaacacgctcagattcacgaaggtaaacgccaccagagcaccgaagttaattaacgctgtggcggtaactaaatcgaagaacagcgcgctcaacgcgacaatcccgaccataatgacgttgagtgccggagtccgccattttgggtgcacatagccaaacacgcgctccggaaacacattgtcacgccccatcacatacagcagacggctcacgctggcatgactagccaggccagaggctaacgtgttcacaaacgtggtgcagaggaaaatgctctggaagagcttgccgccgacgtacagcgcaatttcaggcagtgcggcatccggatctttaaagcggctgatatcgggaaagaacagctgcataaagaagctcgccgcgataaagataacgccaccgtagaccgccgtcaggaagatggctttcgggatcacgcgtgcggcgtccggcgtctcttcgctaagcgtggtcaccgcatcgaaaccgaggaaggagaaacagacaatcgtcgccccggtaataatcgggatcaggtgcgcgttctcgctgataaacggctgaagactccagacggtgccaacgccttctcctttatgcagtccctgaactaccaggaagataaacaccaccatgatggagatttgcaccagtacaaacagggtattgaagttagcgaccaggttgacgctcttcagattcgcggcggttaaaatggcgacgaaggttaccacccacacccacggcggcacttccgggaagagggcggagagatagattttcgccaacaagacgttaatcatcggcaaaaagagataatccagcaggctactccagccgaccataaatccgacgtgcgggttaatgctcttttgcgcgtaggtataggcgctaccggcctccggaaactggcgaaccagtttgccgtagctgatagcggtaaacagcacacccgccagcgccagcaaataggacgccggaacgtgaccgtcgctaatgccggagacaataccaaaagtatcaaatacggtcatcggcgtgagataggccagacccatcatcaccacctgccacaatttcagactttttcgcagacgggttttgccgggttgcgcagcaatattcagtggactattaatagccataattgctgcctcccctgcgtaataaggtttgcggtcgtgtcgacctgaaatcaaacctgtttagcaagggaagcaaagggggcggagtccagtcagtagcaggaggggcgcatacgcagcctccctcgccatgcggggatttaatcatcggcatcatctcatttcctcgtcacagtcttaatcgttaacggaagcccgttgccgcccgcgctccataacgcgacatccgggaaatgtctggattaccagcaaatgtcaggcctggctccgctcaggccgatgaaacaaccccgcaaggggtattacgcgtttttcaacatccactcaatttctgtttctgtgatgaggcgctcaaactgcaacagctcatcatttttacaggcgtgatagacatggcagaagcgttcgcctaaatagcggcgcaggtgatcattctcgataaactcacccagggcatcgctctggcgaatcggaaagggtaagccttcctgttccagcccgttgccttcgacttcttcctgcaacggcagctcgttatcaaggccatgcaaaataccggcaaaaatcgctgccatcaccagatatgggttggcatcggcacccgccacgcgatattccacgcggtgattatgacggtcgccgcacggaatacgcagggcgacggtgcggttgttatggccccagctcgcctgcgtcggcacatacattcccggctggaagcggcgatagctgttcacgtttggtgccagcaacgccatgctgctcggcatcaggtcaatcatcccggcgagcatctttttcagcagcgggctatcttcgccttccgcgtcagaaagcacgttctcgccacgattattttgcatactgatatggatatgcattccgctgcccgcgtgctcttcatacggcttcgccataaaagtggcgtgcatcttatgcttttctgccatcagacgcaccaggcgttttagtgccagcgcatcatcgcaggcttccagcacgttatcagtatggtaaaggttgatttcaaactgacccgggctggcctcagcgaccgcgccatctgccggaatcagctgtaactgcgccagttcatcaatatcattgagcacgtcggcgaagtggttgaggttatcaacggagtaaacctggctttgtgtattgcggtcatcggtgccaggcgcgcagggcggttgcagatacccttcagcgtcgcgctggcgatccagtaaatagaactccagctctaccgctacgaccgggaacaatccgcgctggcgcagctgctgccacaggcggttaagaacgttccgcggctcaacgtcaaagggagcgccatcttcatcgaccatggtcaggagcatctgaccgataaactctggatcggcggcagaaggagttaaggaaccgagaacaggaacacaggtacgatccggctcgcccatttcctgacccagacctgcttcttctactacgttgcccagaatatccattgcaaatacgctggccgggaaataacaccctttctcgagcttcttcaggctactaacaggaatacgctttccacggaagcaaccatttaaatcggtaagtaaaacatcaacatattgcgtattcgggtagcgctccaggtagcgtttcacttcctgcgtaaaggcgctaccccgcctctcttcactctgctgaacaaagttctctacttcaacgatattggtttccatgattcttcgcctttggtttgttttccgctcgttatcaaagcgtaaaatataatgaccaccattcgaatctgtatgcaaactaaatgtttgtcaaatgttaaattgagtttgcaaaaatgaaaacccactgctagattgaaaaaatattgaacataaaggtcatttaaagcgcagtaatggcgataatttagtccactttgtgagattgagcatggaaaatataatgaacaatccggttatcggtgtcgtaatgtgcaggaacaggcttaagggtcatgcgacccagactctgcaagaaaagtacctgaatgccatcatccatgcaggcggcttgcctattgcgctaccacatgcgctggcggaaccgagtttacttgaacaacttttgccgaaactcgatggcatttatcttcctggtagtcccagcaatgtgcagccgcacctatatggtgaaaacggcgatgagcctgacgccgatcccgggcgtgatcttctgagcatggcgataattaatgccgcactcgaaaggcgcatccccattttcgccatctgccggggtttacaagaactggtggtggcaaccggtggtagcttgcatcgcaagctgtgcgaacagcctgaattgctggaacatcgggaagatcccgaactgccggtggaacagcaatatgcaccgagccatgaagttcaggttgaagaggggggattactgtctgcgttgttacctgaatgtagcaacttttgggtaaactctctacatggacaaggggcgaaggtcgttagcccacggttgcgtgttgaagctcgcagcccggatggcttagttgaggcggttagcgtcatcaatcatccttttgcgctgggcgtacagtggcacccggaatggaacagtagcgagtacgcgcttagccgtatattgttcgagggctttatcaccgcttgtcagcaccatatcgctgaaaaacagcgactctgaccactacagtttaaggaaatgcaaatatgagtgatgagggactggcgccaggaaaacgcttgagcgaaatccgccagcagcaggggcttagtcaacgtcgtgccgccgaactctccgggctgactcacagtgctatcagtacgatagaacaagataaagtcagccctgccatcagtacgctgcaaaagctgctgaaggtgtatggtctgagtctcagcgaattcttttccgagccggaaaaacctgatgagccgcaggtcgtcattaatcaggacgacttaattgagatgggtagtcagggtgtgagtatgaagctggttcataacggtaacccgaatcgcacgctggcgatgatctttgaaacgtaccagccgggcacaaccactggggaaagaattaagcatcagggtgaggaaataggcactgtactggaaggtgaaattgttctgacgattaatggtcaggattaccacctcgtcgcggggcaaagttatgccattaataccggcatcccgcacagtttcagtaatacgagcgcaggtatttgccgaattatcagcgcccatacgcccaccacgttttaatctttttgttctgtaagccgggtaagcgcaatgcgcccggcaatctatacacaaaatcattcaagttgcatcaaggcggcaagtgagcgaatcccgatgagcttactcaggtaagtgattcgggggagcgaacgcagccaaggcagaggcggcttgaaggatgaagtgtatataaagaatgtcgccagaaataaacgggcatacggcccggggatctctgcgccctgacgttcacaaactgcatatatctgatagacgtgaaacaggagtcataatgaattttcatcatctggcttactggcaggataaagcgttaagtctcgccattgaaaaccgcttatttattaacggtgaatatactgctgcggcggaaaatgaaacctttgaaaccgttgatccggtcacccaggcaccgctggcgaaaattgcccgcggcaagagcgtcgatatcgaccgtgcgatgagcgcagcacgcggcgtatttgaacgcggcgactggagtctctcttctccggctaaacgtaaagcggtactgaataaactcgccgatttaatggaagcccacgccgaagagctggcactgctggaaactctcgacaccggcaaaccgattcgtcacagtctgcgtgatgatattcccggcgcggcgcgcgccattcgctggtacgccgaagcgatcgacaaagtgtatggcgaagtggcgaccaccagtagccatgagctggcgatgatcgtgcgtgaaccggtcggcgtgattgccgccatcgtgccgtggaacttcccgctgttgctgacttgctggaaactcggcccggcgctggcggcgggaaacagcgtgattctaaaaccgtctgaaaaaagtccgctcagtgcgattcgtctcgcggggctggcgaaagaagcaggcttgccggatggtgtgttgaacgtggtgacgggttttggtcatgaagccgggcaggcgctgagccgtcataacgatatcgacgccattgcctttaccggtagtacccgtaccgggaaacagctgctgaaagatgcgggcgacagcaacatgaaacgcgtctggctggaagcgggcggcaaaagcgccaacatcgttttcgctgactgcccggatttgcaacaggcggcaagcgccaccgcagcaggcattttctacaaccagggacaggtgtgcatcgccggaacgcgcctgttgctggaagagagcatcgccgatgaattcttagccctgttaaaacagcaggcgcaaaactggcagccgggccatccacttgatcccgcaaccaccatgggcaccttaatcgactgcgcccacgccgacagcgtccatagctttattcgggaaggcgaaagcaaagggcaactgttgttggatggccgtaacgccgggctggctgccgccatcggcccgaccatctttgtggatgtggacccgaatgcgtccttaagtcgcgaagagattttcggtccggtgctggtggtcacgcgtttcacaagtgaagaacaggcgctacagcttgccaacgacagccagtacggccttggcgcggcggtatggacgcgcgacctctcccgcgcgcaccgcatgagccgacgcctgaaagccggttccgtcttcgtcaataactacaacgacggcgatatgaccgtgccgtttggcggctataagcagagcggcaacggtcgcgacaaatccctgcatgcccttgaaaaattcactgaactgaaaaccatctggataagcctggaggcctgaaatgaccgaacataccagcagttactacgccgccagtgcgaataaatatgcaccattcgacacgctgaatgagagtatcacctgcgacgtttgcgtggttggcggcggctataccgggctctcctccgcgctgcatctggcggaagcgggctttgacgtagtggttctcgaagccagtcgcatcggctttggcgcaagcgggcgcaatggcggacagcttgtgaactcctacagccgcgacatcgacgtgatcgaaaaaagctacggcatggacaccgcccgtatgctcggcagcatgatgttcgaaggtggtgagatcatccgcgaacgtatcaaacgttatcagattgactgcgactaccgccccggcggcctgtttgtggcgatgaatgataaacagctcgccacacttgaagagcagaaagagaactgggaacgctacggcaataaacagctggaattgctggacgccaacgccattcgccgtgaagtagccagcgatcgctataccggtgcgctgctggatcacagcggtgggcatattcatccgctaaaccttgccattggcgaagcggacgccatccgcctcaacggcgggcgcgtgtatgaactttctgccgtgacgcagatccagcacaccacgccagccgttgtgcgaactgccaaaggtcaggtgacggcgaagtatgtgattgtcgccgggaatgcgtatctgggcgataaagtagagccggaactggcgaaacgcagcatgccgtgcggcacgcaggtgatcaccaccgaacggctgagcgaagatttagcccgtagcctgatcccgaaaaactactgtgtggaagactgtaactatctgcttgattactaccgtcttaccgccgacaaccgcctgctgtacggcggcggcgtggtctacggcgcgcgcgacccggatgacgttgagcgccttgtggtgccgaaactgctgaaaaccttcccgcagctgaagggcgtgaaaattgattaccgctggacgggcaacttcctgctgaccctgagccgtatgccgcagtttggtcgcctcgataccaacatctattacatgcagggctacagcggccacggcgtgacctgtactcatctagccggacgtttgattgccgaactgctgcgcggcgacgccgaacgtttcgatgccttcgccaatctgccgcattacccgttccccggcgggcgcacgctgcgtgtgccgtttaccgcgatgggcgcggcgtattacagcctgcgcgatcgtctgggcgtttaatttccgattaaccgtgaagagtcaaaaggtgtgaaacatgagcaacaatgaattccatcagcgtcgtctttctgccactccgcgcggggttggcgtgatgtgtaacttcttcgcccagagcgctgaaaacgccacgctgaaggatgttgagggcaacgagtacatcgatttcgccgcaggcattgcggtgctgaataccggacatcgccaccctgatctggtcgcggcggtggagcagcaactgcaacagtttacccacaccgcgtatcagattgtgccgtatgaaagctacgtcaccctggcggagaaaatcaacgcccttgccccggtgagcgggcaggccaaaaccgcgttcttcaccaccggtgcggaagcggtggaaaacgcggtgaaaattgctcgcgcccataccggacgccctggcgtgattgcgtttagcggcggctttcacggtcgtacgtatatgaccatggcgctgaccggaaaagttgcgccgtacaaaatcggcttcggcccgttccctggtagcgtgtatcacgtaccttatccgagtgatttacacggcattagtacacaggactccctcgacgccatcgaacgcttgtttaaaagtgacatcgaagcgaagcaggtggcggcgattattttcgaaccggtgcagggcgagggcggtttcaacgttgcgccaaaagagctggttgccgctattcgccgcctgtgcgacgagcacggtattgtgatgattgctgatgaagtgcaaagcggctttgcgcgtaccggtaagctgtttgccatggatcattacgccgataagccggatttaatgacgatggcgaaaagcctcgcgggcgggatgccgcttagcggcgtggtcggtaacgcgaatattatggacgcacccgcgccgggcgggcttggcggcacctacgccggtaacccgctggcggtggctgccgcgcacgcggtgctcaacattatcgacaaagaaagtctctgcgaacgcgcgaatcaactgggccagcgtctcaaaaacacgttgattgatgccaaagaaagcgttccggccattgctgcggtacgcggcctggggagcatgattgcggtagagtttaacgatccgcaaacgggcgagccgagtgcggcgattgcacagaaaatccagcaacgcgcgctggcgcaggggctgctcctgctgacctgtggcgcatacggcaacgtgattcgcttcctgtatccgctgaccatcccggatgcgcaattcgatgcggcaatgaaaattttgcaggatgcgctgagcgattaatagcccaacgcaataatgtctgatgcgctgcgcttatcaggcctgcaaacgacgtattgattatgtatgccgaataaagcattcacgccgcatccggcaagttgtattgctcaacttcgttaaatctggtgctttttcaacaacgcgcggaactgatgataagttaaccccagtaattcagccgcgcgcttctggttatatttcccttgttgcaaactgagttgcagcaactctttttcctgctgcatctgaaactcacgtaaatccagcggcagtgttggaaggctggtggtttcactaacggcgatagcgtcttcaggcggacgccgtttaaagggatcaataatgatgtcatcaagcggataatcgctggtgccgtggcgatacacactacgttccaccacgtttttcaattcacgaatatttcccggccaacgataattcagcaatgtttctctggcgcgctccgtaaaccccgggaacagaggcagcttgatttcccgacacatctggatggcaaagtattctgccatcaacattatgtcgctttcgcgctcgcgcagtggtggcagttgtacaacatcaaaagccagtcggtcgagcaggtcagcgcgaaaagtgccttcattgaccatcgccgggagatcggcattcgtcgcgcataccaaccgcacattcacctgcaatggttggctgccgccaacgcgctccagttcaccgtactcaatcacgcgcaataatttctcctgcaccatcatcggtgccgtagcgagttcatcaagaaatagcgtaccgccgtcggcacgttcaaatctccctggatgacgtttttgcgcaccggtaaacgcccccgcttcgtgaccaaacagttcggaatccagcagattttcatttaacgccgcgcagttaagggaaataaacggcccttgccaacgggaggagagataatgcaggcggctggcaatcagctctttaccggtgccgcgttcgccgatgatgagcaccggtttgtccagcggtgcgagatggctaacctgttccagcacttcgagaaagctgttcgcctcaccaagtaaattatctttgtattctgccatgatgaaattcgccacttgttagtgtaattcgctaactcatcctggcatgttgctgttgattcttcaatcagatctttataaatcaaaaagataaaaaattggcacgcaaattgtattaacagttcagcaggacaatcctgaacgcagaaatcaagaggacaacattatgggtattttttctcgctttgccgacatcgtgaatgccaacatcaacgctctgttagagaaagcggaagatccacagaaactggttcgtctgatgatccaggagatggaagatacactggttgaagtacgttctactagcgcgcgcgcgttggcagaaaagaaacagctgactcgccgtattgaacaagcgagcgcgcgtgaggttgaatggcaggaaaaagccgaactggcgctgctgaaagagagagaggatctggcacgtgcagcgttaattgaaaaacagaaactgaccgatctgattaagtccctggaacatgaagtgacgctggtggacgatacgctggcacgcatgaagaaagagattggcgagctggaaaacaaattgagcgaaacacgcgctcgccagcaggcattgatgttacgtcatcaggcggcaaacagcagccgcgatgtgcgtcgtcagctggacagtggcaaactggatgaagcaatggctcgtttcgaatctttcgaacgtcgtattgaccagatggaagcggaagcagaaagccacagcttcggtaaacaaaaaagcctggacgatcagtttgccgaactgaaagccgatgatgcaatcagcgaacaactggcacaattaaaagccaaaatgaagcaagacaatcaataataacatccaggcggcgtccgaacgcgccgccgctcatcgtctaaggagtacttatgagcgcgctatttctggctattccgttaaccatttttgtgctgtttgttttaccgatctggttatggctgcattacagcaatcgttctggtcgcagtgaattgagccaaagtgagcagcagcgattagcgcaactggctgatgaagcaaaacggatgcgcgaacgtattcaggcgctggaatctattcttgatgcagaacatccgaactggagggatcgctaatggcgggcattaatctcaataaaaaattatggcgtattccacagcagggcatggtccgcggcgtctgcgccgggattgccaactattttgatgtaccggtaaaactggtgcgtatcctggtggtgctgagcattttcttcggtctggcgctgtttaccctggttgcttacatcattttgagttttgcgcttgatccaatgccggacaacatggcctttggtgagcagctaccttccagcagcgaattgctggatgaagtcgaccgtgaactggcggcaagtgaaacgcgtttacgcgagatggaacgttatgtcacttccgatactttcacgttacgtagccgtttccgtcaactgtgaggaaagttatgaatactcgctggcaacaggccgggcaaaaggtaaagcctggtttcaaattagcaggcaagctggtacttcttaccgcactgcgctatggcccggcgggtgtggcgggctgggcgataaaaagtgttgctcgccgaccgctgaaaatgttgctggctgtggcgctggaaccgctgttaagtcgggctgctaataaactggcacagcgttataaaaggtgaggggagtttcgcaaaaattgttaaatctcaggcgtataatggatggcaattttcatccatagaaggacgcttacatgtttaaaaaaggcttacttgctctggcactggtgtttagtctgcccgttttcgccgctgaacactggatcgatgttcgtgttccagagcagtatcagcaagagcacgttcagggggccatcaatattcccctgaaggaagtgaaagagcgcattgccaccgccgttccggataaaaacgacaccgtgaaagtgtattgcaatgccggacgccagagtgggcaagcaaaagagatccttagcgagatgggatatacccacgttgagaacgccggtggcctgaaagacatcgcaatgccgaaggtcaaaggttaaaagaattcaccatgagcggcgcttatgcgccgtttttttttctgtcacaccttatttacatccccatagattatttgcgtcagctcacaaatacgctttttccctggtaaaaaatgatttcctgcgtgactaaaacccttgtgctcaattgacagtttattttctgcggagtagtctctcgtttcatgggaccgctaccacggaaaggcaacatgaaacagaaaattacggattacctggacgaaatctacggtggaacatttaccgcaactcatttacagaaacttgtaacgcgtcttgagagtgcgaaacgattaattacacagcgacgtaaaaaacactgggatgaaagtgatgtcgtgttaattacctatgccgatcaatttcacagcaatgatttaaaaccattacccacatttaatcagttttaccatcaatggctgcaaagcatttttagtcatgttcatttgttgccgttttatccatggagttctgatgatggctttagcgtaattgattatcatcaggtcgccagtgaagcgggggagtggcaggatattcagcaactcggtgaatgcagtcatttaatgtttgattttgtctgcaaccatatgagcgcaaaaagtgaatggtttaaaaactatttacaacagcatccaggttttgaagatttttttattgccgttgacccgcaaaccgatctcagcgccgtcactcgcccgcgtgcgttaccgttattaacgccattccagatgcgcgatcatagtacgcgccatttatggaccacctttagtgacgatcaaattgacctgaattaccgtagccctgaagtgttgctggcgatggtggatgttttactctgttaccttgcgaaaggtgctgagtatgtccgcctggatgccgttggctttatgtggaaagagccgggaacaagctgcatccatctggaaaaaacacatctgattatcaaactgttacggagcattattgataacgttgcgccaggtacagtgatcattaccgagaccaatgttccgcataaagacaacattgcttactttggcgcaggcgatgacgaagcacatatggtgtaccagttcagcctgccgccactggtgctgcatgcggtgcaaaaacagaacgttgaggcgctttgtgcgtgggcgcaaaacctgacactaccttccagcaacaccacctggtttaacttcctcgcctctcacgatggcatcgggctaaacccgctacggggcttgttgcctgaaagcgaaatattagagctggtcgaggcgttacagcaggaaggtgcattagtaaactggaaaaataatcccgacggtacacgcagtccgtatgaaataaatgtgacctatatggatgcgttaagccgccgtgagagtagcgatgaagaacgttgcgccaggtttatccttgcccatgcgattttgttaagtttccccggtgtgccagcgatatatattcaaagtattcttggcagccgtaatgattacgcaggtgtcgaaaaactcggatataaccgtgcgattaaccgtaaaaaatatcacagtaaagagataacccgagaactgaacgatgaagctacattaaggcatgcggtatatcatgagttgagccgtttaattacacttcgtcgcagccataacgagtttcatccggataataattttaccattgatacgattaatagttccgtaatgcgtattccaagaagtaacgctgatggtaattgtctgactggattgtttaatgtcagtaaaaatattcagcatgtaaatattactaatctgcatggtcgggatctgattagtgaagttgatatattgggtaatgaaataacgctgcgcccctggcaggttatgtggattaaataaaaaggaacatctcatgattaaaagtaaaatcgtgctgttaagtgcactggttagttgcgccctgattagtggctgtaaagaagaaaataaaacgaatgtatccatcgaatttatgcattctagcgtggagcaggagcgccaggccgttatcagtaaattgattgcccgttttgaaaaagaaaaccctggcatcaccgttaagcaagtgcccgtggaagaagatgcctataacactaaagtcattactcttagtcgtagcggtagcctgccggaagtgatcgaaaccagccatgactacgccaaagtgatggacaaagagcagcttatcgatcgcaaagcggttgccacagtcatcagcaacgttggtgaaggcgcgttttacgatggcgtactgcgtattgtgcgtaccgaagatggtagcgcatggaccggtgttcctgtcagcgcctggattggcggtatctggtatcgcaaagatgtgctggcaaaagcggggcttgaggagccgaaaaactggcaacagctgctggacgttgcacagaaactgaatgacccggcgaataaaaaatacggcattgcgctgcctacagcagaaagcgtgttgacggaacaatccttctcccagtttgcgttatccaaccaggctaacgtctttaacgccgaaggcaaaatcacccttgatacaccagagatgatgcaggcactgacctattaccgcgaccttactgccaacactatgccgggttctaacgacatcatggaagtgaaagacgcctttatgaacggcaccgcgccgatggcgatttactccacctatatccttccggctgtgattaaagaaggcgacccgaaaaacgtcggtttcgtggtgccaaccgagaaaaactctgcggtctacggcatgttgaccagcctgaccattaccgccgggcaaaagaccgaagagacggaagcagcagaaaaatttgtcacctttatggagcaggcagacaacattgccgactgggtgatgatgagcccaggtgctgcgctgccggtgaataaagcggtggtgactaccgccacctggaaagacaacgacgttattaaggcgctgggtgaactaccgaatcagctaatcggtgaactgccaaatattcaggtttttggcgcagtaggggataaaaactttacccgcatgggtgatgtgacgggttctggcgtggtgagtagtatggtgcataacgtcaccgtgggtaaagccgatctctctactacgctgcaagcgagccagaaaaaactggatgaactgatcgaacagcactaaacccaggacaggaatccgcaatgaacaggctttttagtggtcgttccgatatgccctttgcgctgctgcttctcgcgcccagcttattactgctgggcggtctggtggcgtggccgatggtgagcaatatcgaaatcagttttttacgtctgccgctcaatcccaacatcgagagtacgtttgttggggtgagcaactatgtgcgtatcctctccgatcccggcttctggcatagcctgtggatgacggtctggtataccgcgctggtggtggcgggcagcaccgtgctcgggctggcggtggcgatgtttttcaaccgcgagttccgcctgcgcaaaaccgcgcgtagcctggtgatcctctcctacgtaacgccgtccattagcctggtgttcgcctggaaatacatgttcaacaacggctacggcattgttaactacctcggcgtcgatcttctgcatctctatgagcaggcaccgctgtggttcgataatccgggcagtagctttgtgctggtggtgctgttcgccatctggcgctacttcccgtatgcctttatcagctttctggcgattttgcagaccatcgacaaaagcctgtacgaagcggcagagatggatggcgctaatgcctggcaacggtttcgtatcgtcacgctgcccgcaattatgccggtcctggcgacggtggtgacactgcgcaccatctggatgttctacatgttcgcggatgtttatttgctgacgaccaaggtcgatattctcggtgtatatctctacaaaaccgcctttgcctttaatgatttaggaaaagcggcggcgatcagcgtggtgctcttcatcattattttcgctgtcattctgctgaccaggaaacgggtgaacctcaatggcaacaaataaacgcacactcagtcgcatcggtttttactgcgggctggcgctgtttctcatcatcacgctgtttccattttttgtgatgctgatgaccagcttcaagggcgcgaaagaggcgatcagtctgcatcctacgctgctgccgcagcagtggacgctggagcattacgtcgacatttttaacccgatgattttcccgtttgtcgactacttccgtaacagtctggtggtgtctgtggttagttccgtggtggcggtattcctcggcattcttggggcttacgcgctttcccgcctgcgctttaaaggtcggatgaccatcaacgccagcttttacacggtgtatatgttctctggcattttgctggtggtgccgcttttcaaaatcatcaccgcgcttggcatttacgacactgagatggcgctgatcatcaccatggtgacgcaaactctgcccaccgccgtgtttatgctgaaaagctacttcgacaccatccccgatgagatcgaagaagcggcgatgatggatggcctcaaccgtctgcaaattatcttccgcatcaccgtgccgttggcgatgtccgggctgatatccgtgttcgtctactgctttatggtggcgtggaacgactatctgtttgcgagcattttcctctccagcgccagcaatttcaccttaccggtgggcctgaacgcgctgttcagtacgccagattacatctggggacggatgatggcggccagtctggtgaccgcattgccggtggtgattatgtatgcgcttagcgaacgttttattaagagtggtttgaccgccggtggcgtgaagggctaaagcggccagtttctttacaaggagttttaaatgaaaaagttagtagccacagcaccgcgtgttgctgcgctggttgagtatgaagatcgggcgattttagctaatgaagtgaagatccgcgtgcgtttcggcgcaccgaaacacggaacggaagtggtcgacttccgcgccgccagcccgtttattgatgaagactttaacggcgaatggcagatgttcactccgcgtccggcagatgcgccgcgcggcattgagtttggcaaattccagcttggcaacatggtggttggcgacattatcgagtgcggcagcgacgttaccgactacgcggtgggcgacagcgtatgcggctacggcccgctctccgagacggtcatcattaacgcagtgaataactacaagctgcgcaaaatgccgcaaggcagctcctggaaaaacgccgtctgctacgacccggcgcagtttgccatgagcggcgtgcgcgatgccaacgtgcgcgtaggggattttgtggtggtggtagggcttggcgcaatcggtcaaattgccatccaactggctaaacgcgctggcgcttctgtggtgattggcgtcgatcctatcgcccatcgctgtgatattgcccgtcgccacggcgcggatttctgccttaaccccatcggcactgatgtaggtaaagagatcaaaacgctgaccggcaagcagggtgccgatgtgattatcgaaaccagcggctacgccgacgcgctgcaaagcgcgctccgcggtctggcttatggcggcaccatctcctatgtcgcgtttgccaagccgtttgccgaaggttttaacctcggacgcgaagcgcatttcaataacgccaaaattgtcttctctcgcgcgtgcagcgaaccgaacccggattatccgcgctggagccgcaagcgtattgaagaaacctgttgggaactgctgatgaacggttatctcaattgcgaagatttaatcgacccggtggtgacctttgccaatagcccggaaagctatatgcagtatgtcgaccagcatccggaacagagcatcaaaatgggcgttacgttttaattcaaaggaatgaaaaaaatgaaaatcggcacacagaatcaggcgttctttccggaaaacattctggagaaatttcgttatatcaaagagatgggcttcgatggttttgagattgacggcaaactgctggttaacaacatcgaagaagtcaaagcggcgatcaaagaaaccggtttaccggtgaccaccgcctgcggtggctatgacggatggattggcgactttatcgaagagcgtcgtcttaatggcttaaagcagatcgagcgcattctcgaagcgctggcagaagtgggcggtaaaggcatcgtcgttccggctgcgtggggcatgtttaccttccgcttaccgccgatgaccagcccgcgtagcctggacggcgaccgcaaaatggtgagtgattccctgcgcgtactggaacaggtcgccgcgcgtaccggaaccgtggtgtatctcgaaccgttaaaccgctatcaggatcatatgatcaacaccctcgccgatgcccgccgttacatcgtcgaaaacgatcttaaacatgtacagattatcggcgatttctatcacatgaatatcgaagaagataacctggcgcaggcgctgcatgacaaccgcgacctgctcggtcatgtgcatattgcggataaccatcgctaccagccgggcagcggcaccctggatttccacgcgctgtttgaacagctgcgcgcggataactatcagggctatgtagtgtacgaagggcgtatccgggcggaagatcctgcccaggcgtaccgtgatagcttggcctggttgcgtacctgctaagaggtctttgtgaaaagtgcaatgacaagctctccgctgcgggtcgcgataataggcgcaggccaggtggcggataaggttcatgctagctactactgcacccgcaacgatctggaactggtggctgtctgtgacagccgcctttcccaggcgcaggcgctggcagaaaaatacgggaatgcatccgtgtgggacgatccgcaggccatgctgctggcggtgaaacctgatgtggttagcgtctgcagtcctaaccgttttcattacgaacataccctgatggcactggaagcgggctgccatgtgatgtgcgaaaaaccgcccgccatgacgccagaacaggcgcgggaaatgtgcgataccgcgcgcaaactgggcaaggtgctggcctacgactttcaccatcgttttgcgctcgatacgcaacagctgcgtgaacaggtgaccaacggcgttttgggagagatttacgttaccaccgcccgcgccctgcgtcgctgcggcgttcccggctggggtgtctttaccaataaagaactgcagggtggtggcccgctgatcgacatcggcattcatatgctggatgctgcgatgtatgtgctgggctttccggcggtgaaaagcgtgaatgcgcatagctttcaaaagatcggcacgcaaaagagctgtggtcaatttggtgagtgggatccggcaacttacagcgtcgaagatagcctgtttggcaccattgaatttcataacggcggcattctgtggctggaaacgagttttgcactcaacatccgcgaacagagcattatgaacgtcagcttttgtggtgataaagctggtgcgacgctgtttccagcacatatctacaccgataacaacggtgaattaatgacgctgatgcaacgggaaatagcagacgacaaccgccatttgcgcagcatggaagcctttatcaatcacgtacagggcaagcccgtgatgatagccgacgccgagcaggggtacatcatccagcaactggtggcggcgttgtatcaatccgcagaaacagggacgcgtgtggaattatgaccaggccagtaacgttaagtgaaccccatttcagccagcataccctgaacaagtatgcaagcctgatggcgcaggggaacggctatcttgggcttcgcgccagccatgaagaagattacacgcgccagacgcgagggatgtatctggcggggctgtatcatcgggcgggaaaaggtgaaatcaacgaactggtgaacctgcctgatgtcgtggggatggagattgccataaatggtgaggttttcagcttatcccacgaagcctggcagcgtgagcttgactttgccagtggcgaattacgccgcaatgttgtctggcgtaccagcaacggcagtggttacaccatcgccagccgtcgctttgttagcgcagaccaactgccgctcattgcgctggaaatcactattacgccactggacgccgacgcgagtgtgctgattagtacaggcattgacgccacgcaaaccaatcacggtcgccaacatctcgacgaaacccaggtgcgggtgtttggtcagcatctgatgcaggggagctacaccacccaggatggacgcagtgatgtggccatcagctgttgctgtaaggtgagcggtgatgtgcagcaatgctataccgccaaagagcgccgtttactgcaacataccagtgcgcagcttcatgcaggcgagacaatgacgttgcaaaaactggtgtggatcgactggcgggatgacaggcaagctgctttagacgagtggggcagcgcgagccttcgccagcttgaaatgtgcgcgcagcagagttacgaccaacttcttgcagcaagtacagaaaactggcgtcaatggtggcagaaacgtcgtatcacggtaaatggcggcgaagcgcacgatcagcaagcgttagattatgcgctttatcatctgcgcatcatgacgcctgcccacgacgagcgcagcagcattgcggcaaaaggcttaaccggcgaaggctacaaaggccacgttttctgggatacagaagtatttttgttaccgtttcatctgtttagcgatccgacggttgcccgaagtttactgcgttatcgctggcacaacttgccaggcgcgcaggagaaagcgcgacgcaacggctggcagggcgcgctatttccgtgggaaagcgcgcgcagcggcgaagaagagacgccggaatttgccgccattaacattcgcaccgggctgcggcaaaaagtggccagcgcgcaggcggaacatcatctggtggccgatatcgcctgggcggttattcaatactggcagaccacgggggatgaaagtttcattgcgcatgaaggcatggcgctacttctggagacggcaaagttctggattagccgcgcggtgagagttaacgatcgtctggaaattcatgatgttattgggccagacgaatataccgaacatgtcaataataatgcatacaccagctatatggcccgctacaacgttcaacaggcgctgaatattgcccgccagttcggctgtagcgacgatgcgtttatccatcgcgccgaaatgttcctcaaagagctatggatgccagaaattcagcccgacggcgttttgccgcaggatgatagctttatggctaagccggcgattaatctggcgaaatacaaagcggcggcggggaagcaaaccatactgctggattatagtcgcgcagaagtgaacgagatgcagatcctcaaacaagctgatgtggtgatgctcaattacatgctgccggagcagttcagtgcggcaagctgtcttgccaatctgcaattttatgaaccgcgcactattcacgacagcagtttaagtaaagcaatccacggcattgttgccgcacgctgtggcctgctgacccaaagttatcagttctggcgcgaggggactgaaatcgatcttggtgctgatccgcatagttgtgatgatggtatccatgctgccgcaactggcgctatctggctgggggcgattcagggttttgccggggtgagcgtgcgtgacggtgaattgcatctcaatccggcgttacctgagcagtggcaacagttgtctttccctctgttctggcagggctgcgaattacaggtcactcttgacgcgcagcgtattgcgattcgaacttctgcgcccgttagtctgcgtttgaacggtcagcttataaccgtggctgaagaatctgttttctgtttgggtgattttattttgcccttcaatgggaccgctaccaaacatcaggaggatgaatgaaactgcaaggggtaattttcgatctggatggtgtaatcaccgataccgcgcatctgcatttccaggcgtggcagcagattgccgctgaaattggcatcagcattgatgcgcagtttaacgaatccctaaaagggatcagccgcgatgagtctctgcggcgcattctgcaacacgggggcaaagagggcgactttaacagccaggagagggcgcaactggcgtatcgcaaaaatctgctctatgtccacagtctacgcgagttgacggtcaacgctgttctacccggcattcgctctttgctggcagatctccgtgcacagcagatcagcgttgggctggcttctgtctccctgaatgcgccgacgattttagcggcgctggagctgcgcgagtttttcaccttctgcgcggatgcttcccaacttaaaaacagcaaaccggacccggaaatctttctcgccgcctgtgcagggctgggcgtgccgccgcaggcatgtatcggcattgaagatgcgcaggcgggcattgacgccattaacgccagcggtatgcgcagcgtggggatcggcgcgggcttaaccggggcgcaattactgttgcctagtacggaaagtctcacctggccgcggttaagcgccttctggcaaaacgtataacaaaggaatcaacatggctcagcttagcttacaacatattcaaaaaatctacgataaccaggtgcatgtggtgaaggacttcaacctggaaattgccgataaagagttcatcgtgtttgtcggcccgagcggctgcggtaagagcaccaccctgcgcatgattgccgggcttgaggagatcagcggcggcgatctgttgatcgacggcaaacgaatgaatgacgttccagccaaagcacgcaatatagcgatggtgttccagaactacgcgttgtatccgcatatgacggtttacgacaacatggcgtttggtctgaagatgcaaaaaatcgccaaagaggtgattgatgagcgggtgaactgggcggcgcaaattctcggcctgcgtgagtacctgaaacgtaagccgggggcgctttccggcgggcaacgtcagcgagtggcgcttgggcgggcgattgtacgcgaagcgggcgtgtttttaatggatgaaccgctctctaaccttgatgccaagctgcgcgtgcaaatgcgcgcagagatcagcaagctgcatcagaaactgaacaccaccatgatctacgtgacccacgatcagaccgaagcgatgaccatggcgacgcggattgtgattatgaaagacgggattgttcagcaagtaggtgcgccgaaaaccgtttataaccaacccgcgaatatgtttgtttccggatttattggaagtccagcgatgaattttattcgcggcacgatcgatggcgataaattcgttacggaaacgcttaaattaaccattcccgaagagaaattagcggttctgaaaacacaggaaagtttgcataagcccatcgtgatgggaatacgaccggaagatattcatccggacgcgcaagaggaaaataacatttccgccaaaattagcgtggcagaattaaccggtgcggaatttatgctctacaccacggttgggggcacgagttaaacggttgggggcacgagttagtggtccgtgctggtgcgttaaatgattatcatgcaggagaaaatatcactattcattttgatatgacgaaatgtcatttctttgatgcagaaacggaaatagcaattcgctaaatacagggggaaggcattcccccaggataatacaaggaacaataatgaaaaagttattaccctgtaccgcactggtgatgtgtgcgggaatggcctgcgcacaggccgaggaaaggaacgactggcactttaatatcggcgcgatgtacgaaatagaaaacgtcgagggttatggcgaagatatggatgggctggcggagcctagtgtctattttaatgccgccaacgggccgtggagaattgctctggcctattatcaggaagggccggtagattatagcgcgggtaaacgtggaacgtggtttgatcgcccggagctggaggtgcattatcagttcctcgaaaacgatgatttcagtttcggcctgaccggcggtttccgtaattatggttatcactacgttgatgaaccgggtaaagacacggcgaatatgcagcgctggaaaatcgcgccagactgggatgtgaaactgactgacgatttacgtttcaacggttggttgagcatgtataaatttgccaacgatctgaacactaccggttacgctgatacccgtgtcgaaacggaaacaggtctgcaatataccttcaacgaaacggttgccttgcgagtgaactattatctcgagcgcggcttcaatatggacgacagtcgcaataacggtgagttttccacgcaagaaattcgcgcctatttgccgctgacgctcggcaaccacagcgtgacgccgtatacgcgcattgggctggatcgctggagtaactgggactggcaggatgatattgaacgtgaaggccatgattttaaccgtgtaggtttattttacggttatgatttccagaacggactttccgttagcctggaatacgcgtttgagtggcaggatcacgacgaaggcgacagtgataaattccattatgcaggtgtcggcgtaaattacagcttctgataatgggctaaattgccggatgcggcgcgagtactttatccgatctataaatgtaggccggataagatgcgctagcatcgcatctggcattcaggcaaggtagctggtatttatttcagcgtcatatgcgtggcaacggtaatattctgtggactcggttttccagaaattaagcggaataataactcgcagctttgttgacctaactcctgcgtcggaacatcgatgccgcccggtgcaggcgttaaaataaaactcagcgtttcattgctataacccaccaccgctaactgctgcggaatagcaatatttttctctgctgccgcacgataaatgctcattaatttcaggctgtcagtggcaaacaccgcctcaggcaacggactctggcttaataattgccgtgctgcttttaatgcagtttcatgggtataaccgccatcaacaatccattcatcacgcactgcaatattatgcgcagccaggctctgcttataaccattaacgcgatcaacgctaacatggacatcaagcggagcatgcaggcaggcaatattttgatgcccactttcaattaatgcatcggtcaacgcaatgctgtcgccaaaattatcggtatcgacagaataaacatgggcatattgaccttcaactttgccaatcaccaccaccggaatatcatatttatcgagttgggcaaaaaaactctcatccgctgggctactgagcataataatgcctttaatcattttctgcttaattttgctttcgcatttttgcagatcttctgccggattgtggctcgtttgtaatatcacgtcgaaaccttcttcttcagctttggcggtgatggcatgcaaaacttcagagaaaaacggattacccgccgtagttttggtgctacgggtagaaatcaccataatggcatcaaaaccgctagaggtcagcgcgcgggccagcttgtttggctgatactgtaattcttcaatggcccgtaacactttttcgcgcgcttccggggagatattagtttgcttattcagcacgcgacttacggtggatttacttacgcctgcaaccctggcaatatcataaatagtaggggacataggtcaggaactccgtccgaacgtgaatgctgcacatcttatggagttcgccggtcgatgacaacacgggcagttgataatcaatggcctggcccccacattcatatccttacgaatgattttttttctggtcttcagagcagcacaggacagcaatgaagcgacttaaaaatgaactcaatgcgctggtgaatcggggtgtcgacagacatctgcgcctcgctgtaaccggacttagccgcagcggcaaaacagcgtttatcaccgcgatggttaatcagttgcttaatattcacgccggagcacgtttgccgctgttaagtgcggtgcgtgaagagcgcctgctgggcgtgaaacgcattccccagcgtgactttggcattccgcgcttcacctatgacgaagggctggcgcagttatatggcgatccacccgcctggccaacgccaacgcgcggcgtcagtgaaatccgcctggcgctacgttttaaaagcaatgatagcctgctacgccactttaaggatacctccacgctgtatctggaaattgtggattatcccggcgaatggttgctcgacctgccgatgctggcgcaggactatttaagctggagccgccagatgacgggcttactcaatggtcagcgcggagaatggagcgcgaaatggcgaatgatgagcgaagggctggacccgctagcgcctgccgacgaaaaccggctggcggacattgccgccgcgtggaccgattatctccaccactgtaaagagcaggggctgcactttattcagcctgggcgctttgtcttgccgggagatatggcaggtgcgcccgcgctgcaattcttcccgtggccggatgtcgatacctggggcgagtccaaactggcgcaggccgataagcataccaatgccggaatgctgcgcgagcgctttaattattactgcgagaaggtggtgaaggggttctataagaatcattttctgcgctttgaccgccagattgtgctggtggattgcctgcaacctctcaacagtgggccacaggcatttaatgatatgcgtctggcactgacgcagctgatgcaaagttttcactacgggcagcgtaccctgttccggcgtttgtttagcccggttatcgataagctattgtttgctgccactaaagcggaccatgtgaccatcgatcagcacgctaatatggttagtttactgcaacaactgattcaggatgcctggcaaaatgcggcgttcgaagggatcagcatggactgcctggggctggcgagtgttcaggcgaccaccagcggcattattgatgttaacggtgagaaaatcccggcgctgcgtggtaatcgacttagcgatggcgcaccgctcactgtttatcctggcgaagttcccgcacgtttgcctggtcaggcgttctgggataagcaaggcttccagtttgaggcatttcgtccgcaggtgatggatgtcgacaaaccactaccgcatattcgtcttgatgctgcgctggaatttttaataggagataaattgcgatgaccgaaccgttaaaaccacgtattgatttcgacggtcctctggaggtcgatcagaatcctaaattcagggcgcagcagacctttgacgaaaatcaggcgcaaaattttgccccggccacgctcgacgaagcgcaggaagaagaggggcaagtcgaagcggtaatggacgcagcgttacgtccgaaacgcagcctgtggcgcaaaatggtgatgggagggctggctctgtttggcgcaagcgttgtcgggcagggtgtacagtggacaatgaatgcctggcaaacccaggactgggtggcgctgggtggatgtgccgctggggcattgattatcggcgctggcgtaggttctgtggtaacagagtggcggcgcttatggcgcttgcgacagcgcgcccatgaacgcgacgaagcgcgtgatttattgcatagccacggcacgggcaaaggccgcgcattttgcgaaaaactggcgcagcaggcgggtattgatcagagccatccggcgctgcaacgctggtatgccagtatccatgaaacgcaaaacgaccgtgaagtggtcagcctgtatgcgcatttggtccagccagttttagatgcccaggcgcggcgcgaaatcagccgtagcgcggcggaaagtacgttgatgattgcggtcagcccgctggcgttggtcgatatggcgtttatcgcctggcgcaatctgcgtttaattaatcgcatcgccacgctgtatggcattgaactggggtattacagccgtttgcgtctgtttaagctggtattgctgaatatcgcttttgccggagccagcgaactggtgcgcgaagtggggatggactggatgagccaagatctcgctgctcgtttgtctacccgcgcagctcaggggattggtgcaggacttctgacggcacgactcgggattaaagctatggagctttgccgcccgctgccgtggattgacgatgacaaacctcgcctcggggatttccgtcgtcagcttatcggtcaggtgaaagaaacgctgcaaaaaggcaaaacgcccagcgaaaaataatgcaatatcgggtgctgaccggatatctttacgccgaagtgcccgtttttccgtctttgtgtcaatgattgttgacagaaaccttcctgctatccaaatagtgtcatatcatcatattaattgttcttttttcaggtgaaggttcccatgcgtctggaagtcttttgtgaagaccgactcggtctgacccgcgaattactcgatctactcgtgctaagaggcattgatttacgcggtattgagattgatcccattgggcgaatctacctcaattttgctgaactggagtttgagagtttcagcagtctgatggccgaaatacgccgtattgcgggtgttaccgatgtgcgtactgtcccgtggatgccttccgaacgtgagcatctggcgttgagcgcgttactggaggcgttgcctgaacctgtgctctctgtcgatatgaaaagcaaagtggatatggcgaacccggcgagctgtcagctttttgggcaaaaattggatcgcctgcgcaaccataccgccgcacaattgattaacggctttaattttttacgttggctggaaagcgaaccgcaagatagccataacgagcatgtcgttattaatgggcagaatttcctgatggagattacgcctgtttatcttcaggatgaaaatgatcaacacgtcctgaccggtgcggtggtgatgttgcgaagtacgattcgtatgggccgccagttgcaaaatgtcgccgcccaggacgtcagcgccttcagtcaaattgtcgccgtcagcccgaaaatgaagcatgttgtcgaacaggcgcagaaactggcgatgctaagcgcgccgctgctgattacgggtgacacaggtacaggtaaagatctctttgcctacgcctgccatcaggcaagccccagagcgggcaaaccttacctggcgctgaactgtgcgtctataccggaagatgcggtcgagagtgaactgtttggtcatgctccggaagggaagaaaggattctttgagcaggcgaacggtggtagcgtgctgttggatgaaataggggaaatgagtccacggatgcaggcgaaattactgcgtttccttaatgatggcactttccgtcgggttggcgaagaccatgaggtgcatgtcgatgtgcgggtgatttgcgctacgcagaagaatctggtcgaactggtgcaaaaaggcatgttccgtgaagatctctattatcgtctgaacgtgttgacgctcaatctgccgccgctacgtgactgtccgcaggacatcatgccgttaactgagctgttcgtcgcccgctttgccgacgagcagggcgtgccgcgtccgaaactggccgctgacctgaatactgtacttacgcgttatgcgtggccgggaaatgtgcggcagttaaagaacgctatctatcgcgcactgacacaactggacggttatgagctgcgtccacaggatattttgttgccggattatgacgccgcaacggtagccgtgggcgaagatgcgatggaaggtagcctggacgaaatcaccagccgttttgaacgcagcgtattaacccagctttatcgcaattatcccagcacgcgcaaactggcaaaacgtctcggcgttagtcataccgcgattgccaataagttgcgggaatatggtctgagtcagaagaagaacgaagagtaagcgcgaatatgcctgatggtgcaacaccatcaggcatattaaattatgctttcagtacagccagagctgcttcgtaatccggctcggtggtgatttcatccaccagctggctgaaaatcacattgtcattttcgtcaataaccacaacggcacgcgctgccagacctttcagtgggccatcagcaattgccacaccgtaagcttgcagaaattcagcgttacggaaagtggagagggtgataacgttgttcagaccttctgcgccgcagaaacgagactgggcgaacggcagatcggcagagatacacagcacaacggtgttgtcgatctcagttgccagttggttaaacttacgtacacttgcggcgcaaacaccggtatcaatactcgggaaaatgttcagcactttgcgtttacccgcaaactgaccgagggtgacgtcagacagatcttttgccacgagagtaaaagtctgcgctttgctacccgcctgcgggatggaattggcgactgtaaccgggttgccctggaaatgaacggtttgactcatgattatctttcctgtttacatatagttaacgtcacacctagtttatgctaactgtcaataacacagcaaacgctattacagggtctccttacaacaactgtcaacgcagtttgtaattaaaagattaacccatatctggtgaatgaaacagtgatgaaccttctgccagatcaataaatcagaaaaatttaatgatatgacagaaggatagtgagttatgcggaaaaatcaggcaacgttacgcgtatgaccagcaagctgggccagcgcatcgttattttcgatggtgatgtatttacctttgactgccagcatgccgcttttctggaagcgacccagcagacggctgatggtttctaccgtcaggcccagatagttaccgatatcgccacgagtcatcgtcaggcggaattcacgaggggagaagccgcgttgggcaaaacgacgggacaggttgtagatgaatgcagccagacgttcctcggcatttttcttgctcaacagcaggatcatgtcctgatcgcctttgatttcaccgctcatcagacgcatcatctgctgacgcagattcggcattttaccggacaaatcgtccagcgtttcgaacgggatttcacataccatgctggtttccagcgcctgcgcgaagctcgggtgatggccgctgccgatggcgtcaaatcccaccaggtcgcctgctaaatggaaaccagtgatttgctcgtcgccttgctcagtgatggtataacttttaatcgtaccggagcggatggcataaaggcttttaagttcatcaccagccttaaacagcgtctggcctttctgaataggcttcttccgctcaatgatattatcaagctgatcaagctcatgttcgttgagtgtgaacgggatgcaaagctggctgatgctgcaatcctggcaatggatagcacaaccgccagactgaatgcgccgtataattcgcttttccgggatcataggtctgctcaagccgtaattgatatttgtcaattttaacatctttttagggagcaagtaagtctaagcaaaccttaacagcagagaattccgatattagatgtaaatatatgtctatctatttgaaaacccttaagttgttaagggtaactttacataaaagtgtgaacaagctggcacaaattgtttaatgtttacagcaaaagataaccttcatggcgcaataaccactcttttcgctgaactccgcctgcatatccggtcatggtgccgtttcggccaataacccgatggcaaggtacgacgatgctgatgggattgcttccgtttgccgcaccaacggcacgcgccgcgccaggacggcccaattgctcagccagttggccgtaatgcattacctgcccgcaggggatagtgcgtagtgttttccagacttcgcgctgaaatggcgtcccccccgtagcagtgggaagcgtatcaataatgctaagattaccggcaaaatattcacgaagcttgtcgcttaaaccgcctggattggtggcagaaatgcgctcatagccttctttgcgataatggatgtccagcagctgcaccatgcgttcgctgtactcttcccattcaaccgcccgcaggcgaaattgctcatcgcaaatcacccacagtggacccagtggcgtggcaattttttcttcaagtaatctcagcatccgttctctcttaagacaaacgtgggtaaatacccggacctatcggcagaccgacaagataccacgccagcacatcgcagccatactatgcagaaacaatgctgtcgatggctgcttttgcgtcagactgtgctttcgctgccatttccggaccgtatgcgatcccttcggcgaagacaaatttcacatcggtaatgccgataaagccgaggaacgtggacagatacggcgtcaccaggtccgttggtccatctttgtggatcccgccgcggctggtaataacgatggcttttttacccgttaccagaccttccggaccgttctcggtatagcggaaagtaacgcctgcgcgggcaaccaggtcaaaatagtttttcaactgagtcgagatgttgaagttatacatcggtgccgcaataacgataacgtcgtgggctttcagctcggcaatcaactcatcggaaagtgccagagcttcctgctgacgcggagtcagcggcgcatcgctcggacgcagagcgccaaccagttcgccatccagtaccggaatcggatttgcagccaggtcgcgaacggtgatttcatcagcggagtgcttttcgcgccattgttcaacaaaataatcggacaactgattagactgagagtaccctgccaggatgctggatttaagaactaataccttgctcatggtgtttccttatagatgtttgaatgggcgatgccccgttgcttgttgacactttattcacaatcctgccacagagatagcgcaataaatcgaagcctatgttcgaatttattgaacaacgcatagaaagccgcgatgtggtactctatatctatcatttaaaagaaaattaatcaggcagactactgcccactaacgttatgacagaacaacaaaaattgacctttacggccttgcagcagcggctggattcgctgatgctgcgtgacagactgcgtttttctcgccgtctgcacggcgtgaagaaggttaaaaatcctgatgcacaacaggccattttccaggagatggcgaaagagattgaccaggcggcagggaaagtcctgctgcgtgaagcggcacgaccggaaattacttatcctgacaatttaccggttagtcagaaaaaacaggacattctcgaagcgattcgtgatcaccaggtggtgatcgtcgccggggaaacgggttctggtaaaacgactcagttaccgaaaatctgtatggagctggggcgcgggattaaaggactgatcggccatacccagccgcgtcgtctggcggcaagaacagtggcgaaccgtattgcggaagagctgaaaacggagccgggcggttgcatcggttacaaagtgcgtttcagcgatcacgtaagtgataacacgatggtcaagctgatgaccgacggtatcctgctggcggagatccagcaagaccgcctgctgatgcagtacgacactatcattattgacgaagcgcacgaacgcagcctgaatatcgattttttgctcggctatttgaaagagttgctgccgcggcgtcctgacctaaaaatcattatcacttccgcgactatcgacccggaacgctttagccgccactttaataatgcgccgattattgaagtctccggtcggacctatccggtggaagtgcgctatcgcccgattgttgaagaagccgatgacaccgagcgcgatcagttgcaggcgatttttgacgccgtagacgaactgagtcaggaaagccatggcgacattctgatctttatgagcggcgagcgggaaatccgcgataccgccgatgcgctgaacaagctgaacttacgccataccgaaatcttgccgctttatgcgcggcttagcaacagcgaacaaaatagggtattccagagccacagcggacggcgcattgtgctggcgaccaacgtcgcggaaacgagcctgaccgtaccggggattaaatacgttatcgaccccggtacagcgcgtatcagccgctacagctatcgcaccaaagtgcagcgtttgccgattgagccgatttcccaggcgtctgccaatcagcgtaaaggccgctgtggtcgtgtgtccgaagggatctgtattcgtctctattccgaagacgatttcctcagccgcccggagtttaccgatccggagattctgcgtaccaacctggccagcgttattttgcagatgaccgcgctggggctgggcgatatcgctgcgttcccgtttgtcgaagcaccggataaacgcaatatccaggatggcgtgcgtctgctcgaagagctgggcgcgatcaccactgatgaacaggccagcgcctataaactgacgccgctcggtcgccagctcagccagttgcctgtcgacccacgtctggcgcgtatggtgctggaagcgcaaaaacatggctgcgtgcgtgaggcgatgattatcacgtccgcgctctccattcaggatccgcgcgaacgtccgatggacaaacagcaggcaagcgacgaaaaacatcgtcgcttccacgacaaagagtctgactttctcgcgtttgtgaatctgtggaattatcttggcgagcagcaaaaggcgctttcttccaacgccttccgtcgcctgtgtcgtaccgattatctcaactatctgcgcgtgcgcgaatggcaggatatctacacccagttgcgtcaggtggtgaaagaacttggcattccggttaacagcgaaccggcggagtatcgcgaaattcacattgcgttgctgaccggtttactttcccatatcggcatgaaagatgccgataaacaagaatataccggcgcacgtaacgcgcgtttctccatcttccccggttctggtttattcaaaaaaccgcctaaatgggtaatggtggcggaactggtagaaaccagccgcctgtgggggcgcattgctgcgcgtatcgacccggaatgggtggagccagttgctcagcatttgattaaacgcacctacagcgaaccgcactgggaacgggcgcagggcgcggtgatggcaacggaaaaagtcactgtttatggtttgccgattgttgccgcgcgcaaggtcaactacagccagatcgatccggcgttatgtcgtgaactctttattcgccacgcgctggtggaaggtgactggcagacgcgtcacgcattcttccgtgaaaacctgaaactacgggcggaagtagaagagctggaacacaaaagtcgtcgccgcgatattctggttgatgacgaaacgttgtttgagttctacgaccagcgcatcagccacgatgtaatctccgctcgccacttcgacagctggtggaaaaaagtcagccgcgaaacgcctgatttgctcaactttgaaaaaagcatgttgatcaaagagggcgcagaaaaaatcagcaagctggattacccgaacttctggcatcagggcaatctcaagctgcgtttgagctatcagtttgagcccggcgcggatgctgacggtgtgaccgtacatattccgctgccgttacttaaccaggttgaggaaagcgggtttgaatggcagatccccggtctgcgccgcgaactggtgattgctctgattaaaagcttgccgaaaccggtacgccgtaattttgtacccgcgccaaactatgccgaagcgtttttaggccgcgtcaaaccgctggagttaccgttgctcgacagccttgagcgcgagttacggcggatgaccggcgttaccgttgaccgcgaagactggcactgggatcaggtgcccgatcacctgaaaattaccttccgcgtggtggatgacaaaaacaagaagctaaaagaagggcgcagcctacaagatctgaaagatgcgctgaaaggcaaagtgcaggaaacgctatctgcggtggcggatgacggtatcgagcagagcggcttacatatctggagttttggtcagctgccggaaagctacgaacagaagcgtggcaactacaaagtgaaggcgtggccggcgctggtggatgagcgcgacagtgtggcgatcaaactgtttgataacccgctggagcaaaagcaggcaatgtggaacggtcttcgccgtctactgctgctgaatattccaagcccaatcaaatatttacatgaaaagttaccgaacaaagccaagctgggactgtactttaacccgtatggcaaagtgctggagctgatcgacgactgtatctcctgcggtgtggataaattgatcgacgccaatggtggcccggtctggacggaagaaggctttgctgcgctgcatgaaaaagtgcgtgccgaactgaacgacacggtggtggatattgcgaagcaggtcgagcaaatccttacggcagtgttcaatatcaacaaacgtctgaaagggcgggtggatatgaccatggcgctggggctttctgacattaaagcgcagatgggcgggttggtatatcgcggttttgtcactggtaacggcttcaaacggctgggcgacacgctgcgatatttgcaggcgattgaaaaacggctggaaaaactggcggttgatccacatcgcgaccgtgcgcagatgctgaaagtcgaaaacgtccagcaggcgtggcagcaatggatcaacaaactgccgcccgcacgtcgtgaggatgaagacgtgaaagagatccgttggatgatagaagagttgcgcgttagttacttcgctcaacaacttggtacgccttatccgattagtgataagcgtattttgcaggcgatggagcagattagcggttaaccctgctatttgcctgataaagaaaaaacccggtaagcatttagcgccgggttttttattaattctaaaacggtaagggtaaaaattcaggaattcagaaaaatacaattctctgctgcaagatgaataatgtttatctacagcatttccttaaaagatatgtcaggcttgcggagtggcggttaaggacatacgatttcctcctttcagagtgctccgcttctcactattatctcacgcagtattcttaagggaacgataaggaggaaccatgaacattaccccgtttccgacgcttagcccggcaactatagatgccataaatgttatcggacagtggctggcgcaggatgatttctccggtgaggtgccgtatcaggccgattgcgtgatccttgcaggcaatgcggttatgccgactatcgatgcggcatgtaagattgcccgcgatcagcaaattcctttactgattagtggtggtatcggtcacagcacaacttttttgtatagcgccatcgcacagcatccgcactacaacactatccgcaccactggcagagcagaagcgaccatcctggcggatatcgctcatcagttctggcacattccgcatgaaaaaatctggattgaagaccagagtacaaactgcggtgaaaacgcacgctttagcatcgcgctattgaatcaggccgtagaacgagttcatacggctatcgttgttcaggaccccaccatgcagcggcgcacgatggcgacgttccgccgtatgactggggacaatcccgatgcaccacgctggttaagttatcccggattcgttcctcagttaggaaataacgcagacagtgtaatctttattaatcagttacaaggattatggccagttgagcgttatctcagtctactcactggcgagctgccgcgtttacgcgatgatagcgatggctacggtccccgcgggcgagattttatcgttcacgttgattttccggcagaagtcatccatgcatggcaaacgctgaaacatgatgcggtgctcatcgaggcgatggaaagtcgcagcttacgttaaaaattgcccgtttgtgaaccacttgtttgcaaacgggcatgactcctgacttttatttctgccttttattccttttacacttgtttttatgaagcccttcacagaattgtcctttcacgattccgtctctctgatgattgatgttaattaacaatgtattcaccgaaaacaaacatataaatcacaggagtcgcccatgagtgtacccgttcaacatcctatgtatatcgatggacagtttgttacctggcgtggagacgcatggattgatgtggtaaaccctgctacagaggctgtcatttcccgcatacccgatggtcaggccgaggatgcccgtaaggcaatcgatgcagcagaacgtgcacaaccagaatgggaagcgttgcctgctattgaacgcgccagttggttgcgcaaaatctccgccgggatccgcgaacgcgccagtgaaatcagtgcgctgattgttgaagaagggggcaagatccagcagctggctgaagtcgaagtggcttttactgccgactatatcgattacatggcggagtgggcacggcgttacgagggcgagattattcaaagcgatcgtccaggagaaaatattcttttgtttaaacgtgcgcttggtgtgactaccggcattctgccgtggaacttcccgttcttcctcattgcccgcaaaatggctcccgctcttttgaccggtaataccatcgtcattaaacctagtgaatttacgccaaacaatgcgattgcattcgccaaaatcgtcgatgaaataggccttccgcgcggcgtgtttaaccttgtactggggcgtggtgaaaccgttgggcaagaactggcgggtaacccaaaggtcgcaatggtcagtatgacaggcagcgtctctgcaggtgagaagatcatggcgactgcggcgaaaaacatcaccaaagtgtgtctggaattggggggtaaagcaccagctatcgtaatggacgatgccgatcttgaactggcagtcaaagccatcgttgatagtcgcgtcattaatagtgggcaagtgtgtaactgtgcagaacgtgtttatgtacagaaaggcatttatgatcagttcgtcaatcggctgggtgaagcgatgcaggcggttcaatttggtaaccccgctgaacgcaacgacattgcgatggggccgttgattaacgccgcggcgctggaaagggtcgagcaaaaagtggcgcgcgcagtagaagaaggggcgagagtggcgttcggtggcaaagcggtagaggggaaaggatattattatccgccgacattgctgctggatgttcgccaggaaatgagcattatgcatgaggaaacctttggcccggtgctgccagttgtcgcatttgacacgctggaagatgctatcagtatggctaatgacagtgattacggcctgaccagtagtatctatacccaaaatctgaacgtcgcgatgaaagccattaaagggctgaagtttggtgaaacttacatcaaccgtgaaaacttcgaagctatgcaaggcttccacgccggatggcgtaaatccggtattggcggcgcagatggtaaacatggcttgcatgaatatctgcagacccaggtggtttatttacagtcttaatgagtgaaagaggcggaggttttttcctccgcctgtgcgcgtcagagtttagcgaatttttcgagggtgcgaataagctgtgtgacgaagccatattcgttatcgtaccaggcgaccgttttcaccagttgtaaatcgcccacggcggtaatttccgtttgcgtggcatcaaacaccgaaccgaaatggctgccaatgatatcggaagagactatttcttcatcggtataaccaaatgactcgttattggtggttgcttgtttaagtgcgttattcacctcttcggcagtcacttttttccgagaatcgataccagttcagtgaccgaacctgttttcaccggcacgcgttgcgcatgacctttcagtttgccgctcagttccgggatcaccagaccaatggcttttgccgcccccgtagtgtggggaatgatattttctgccgctgcgcgtgaagcacgtaaatctttaccacgcgggccatccaccagtgactgggtgccagtataggcatgaatggtcgtcatcgtgccgacttctatcccgaaactgtcatgcaaggctttggccatcggcgcaagacagttagtggtgcatgacgccacggaaacaatggtgtcgttgccatccagagtgtcgtcattgacgttataaacgatagttttcatttcaccggcaggggcggaaatcaacaccttcttcgcaccagcatcaagatgcgcctgcgatttctcggcggaggtataaaagccagtacattcgacaatgatttctgcacctttcgctttccacggaatatttttagcctctttttcggcgtaaaccgcgatacttttcccatcaacgataagtgaatcttccgtaaaatcaacgctccaggggaatggtccgtagtttgaatcatgtttcagcaggtaggcgagaatttatggggaagtgagatcattaatagcgacaacgtctatgttgcttttgacttcaagtaatcgacccaacaccagtcgaccgatacgaccaaaaccgttaataccaactttactcatggttttctcctgtcaggaacgttcggatgaaaattgatcctttccaagcttagaccaggatggcgggatgggcaatctccattctcacagtgaaacgtaacgtactgaaaacgggtgaacaatatttaatgaaattttgagaaaagcccgttatgttaacggaaaattatgttaaagcaggaaatgttatggaaaataaatatagtaggttacaaatcagcattcactggctggtctttttactggttatcgcagcgtattgcgcaatggagtttcgtggtttcttcccacgtagcgatcggccactcatcaacatgattcatgtttcctgtggcatcagtattctcgtgctgatggtcgttcgtcttttgttaaggctgaaatacccaaccccgccgattatacctaagccaaaaccgatgatgacgggactggcgcatttgggacatttggtgatttatctcctgtttattgcgctgccagtgattggtttggtgatgatgtataaccggggcaacccgtggtttgcgtttggtttgacgatgccttacgctagtgaggccaatttcgaacgggtagatagcttaaagagctggcatgaaacgctggcgaatctgggatattttgtcatcgggttgcacgctgcggctgcactggcacaccactatttctggaaggacaacacacttctacgcatgatgccgcgtaaacgttcctgaaggatatttaaagaaaacgcctgtactaaaaccgacccgtggtacaggcgaagaatacgggtctacatcggaagcgcctattatatttatttgtatgataaataaaaccataatccttgcccatacgtccatctggcttatttttaatcaattcacccgatctttgatctcatcaacggtatcaaaataaaccagcgtataacgttcaaatcgaacataagattcgataaaccatggaggttatatgaaaaaactggcacttattttgtttatgggaacgcttgtttccttttatgccgatgccgggcgcaaaccctgttctggtagcaaaggggggatcagtcactgtacggcaggcggcaaatttgtctgtaatgatggttctattagtgcaagcaaaaaaacatgcactaactgaagtgtaaaaggggtgccatgagaaaatgaatctgctagtcaaatgcgcggggaaaatccccgcgcttgcccttacctggacgtgcaggccatgagcgcagcaacctccttatcaccgtcccggaaccgcagttcgtagagcgtttgtcgggtcaggagtgtgaatgtcagaatcgtaatgcagataatgagcagacacaccaccagagggttgtgcttcatagcctttctccttgccggatggcgggtaagaggctaagatctgaattgctaggttcattcgttggcctcggttgatagaaatatcggtcggggccttcgtctttctgattcccggttagcctgaaaacagaaagtctcaggcacccgcaggcatcctatgaggtttccttagggacgaaaataatcacttcacgaaattgcgtgctgttttccagaatttttcgtcattcgggttagccagtttagccattcgttactctcttcattccaatagcattaattttctatgcaataattgttgtaaaaatgtgacgcaaagaggtttttggtcataagtaattaccgtcaagtgccgatgactttctatcaggagtaaacctggacgagagacaacggtaatgaatacaactcccagtcagcgattaggttttttgcatcacatcaggttggttccgttatttgcctgcattctaggcggtatcttagttctattcgcattaagtagtgccctggctggctatttcctctggcaggccgatcgcgatcagcgtgatgttactgcggagattgagattcggaccgggttagcgaacagtagtgattttttgcgtagtgcccggatcaatatgattcaggccggggctgcgagtcgtattgcggaaatggaagcaatgaagcgaaatattgcgcaagccgaaagcgagattaaacagagccagcaaggttatcgtgcttatcagaatcgaccggtgaaaacacctgctgatgaagccctcgacactgaattaaatcaacgctttcaggcttatatcacgggtatgcaacctatgttgaaatatgccaaaaatggcatgtttgaagcgattatcaatcatgaaagtgagcagatccgaccgctggataatgcttataccgatattttgaacaaagccgttaagatacgtagcaccagagccaaccaactggcggaactggcccatcagcgcacccgcctgggtgggatgttcatgattggcgcgtttgtgcttgccctggtcatgacgctgataacatttatggtgctacgtcggatcgtcattcgtccactgcaacatgccgcacaacggattgaaaaaatcgccagtggcgatctgacgatgaatgatgaaccggcgggtcgtaatgaaatcggtcgcttaagtcgtcatttacagcaaatgcagcatagtctggggatgacagtagggactgttcgacagggcgcggaagagatttatcgtggcaccagcgaaattagtgctggcaatgcggacctgagttctcgcaccgaagaacaagcggcggctatcgaacaaactgccgccagcatggagcaactcactgcgacggtgaaacagaatgcggataacgcgcatcatgccagcaaactggcgcaagaggcttctattaaagccagcgatggcgggcagacggtttccggtgtagtaaaaacgatgggcgctatctccacgagtagcaagaaaatttctgagatcaccgccgtcatcaacagtattgctttccagacgaatattctggcactgaatgctgccgttgaagccgcgcgagcgggtgagcaagggcgtggatttgccgttgtcgccagcgaagtacggacactcgcaagtcgcagcgctcaggcggcgaaagagattgaaggcttgatcagtgaaagtgtcaggttaattgacctggggagcgatgaggtggcaacggccgggaaaaccatgagcactattgttgatgccgtcgcgagtgtcacacatatcatgcaggaaatcgccgccgccagcgatgaacaaagtagaggcataacgcaggttagccaggcgatttctgaaatggataaggtgacgcaacagaatgcttctctggtagaagaggccagtgcggcggcggtgtcccttgaagaacaggcggcacgattaactgaggcggtggatgtattccgtctgcacaaacattctgtgagcgcagaacctcgcggagcgggtgaaccagttagtttcgctacggtgtgaaaatgttcaaggagggatcgacagatcccttcacctttcagaacggcatactttttcgaatagcgttaatcatcaactggcaaccagaagagaacgtcgcatctacgcgggtcagtattccaatcggttcgcctgcaccatgtcccggaacaggcagggccaccagcgtggcatgacgcaggtcgtcttttacagcgccagaagggacaaaccacacgtaatcgtattcaaccgtaagttgacgagataggctagcagacagcgtttcgatacaaccgctaggaattttacagccctggctctgcactaatgcatcactatgctggcgtggcgcagtgccttctggacttacaacgaccggccattccagcacccggcttagcgttacgttctcctgaagtagcgggtgattagggcggacaaccagcttcaagctttcaagaaacagcagttcgtaattaagcccggtcatcagttcaggatcactcatccgaccaatgccgatatcgatttccccggtttttaaacccgccagaatcatagggttactcattgtcgcaacttgcaaggtcgtctctttttgttgctgatgaaactgacctataacgctaggtaatatccccagtgccgcagtaggtagtgcaccaaccctgacgacatcattattaagaccttctttacgatgaaggctccgtccggcagtgttgatggcgtcaagaactctgactgcatgcgttaaaaattgttcgccgggtaaggtaagttgcgccccctgacgaccacgctcaaacaagcgagcgccagtcagctgctccagttcattcaatgtcttagagagcgcaggttgactcaaattaagggtttcagccgcgcgccccaaagttccttgttgtgcgacagctacgaatgtatgaaggtggcgcaaacggatgcgctgactaaacagactatttttttccataagcgatgttaaaaacgaagcggtgtcgctgacaagtgaagttgtttgattatgataacttgattgcaaaatattattaacaattaaagcaattatgttacagcaaaatggataatattgatgttttcgcggcgagatcacagtttgtaaattcttcccgcaagagtgaatgcggttacctacactccagattactgaccactggaggcagacactatggcgaacagcatcacggcggatgagattcgggaacagtttagccaggcaatgagtgccatgtaccagcaagaagttccgcaatatggcacgctgctggaactggtagctgatgtgaatctggctgtgctggaaaacaatcctcaactgcacgaaaaaatggtaaatgcagacgagctggcgcgactgaatgttgaacgtcatggggcgattcgcgttgggactgcacaagagcttgctactcttcggcggatgtttgccattatggggatgtacccggtgagctattacgatctcagccaggcaggggtgccggtacatagcacagcatttcggcccattgatgatgcttctctggcgcgtaatcccttccgcgtttttacctccttactccgccttgagcttatcgagaacgaaattttgcgccagaaagcggcggagattctgcgtcagcgcgatatcttcaccccacgttgtcgacaactgttagaggaatatgagcagcagggcggctttaacgaaacacaggcacaggagtttgtgcaggaagccctggaaacgtttcgctggcaccagagtgcaacggtagatgaagaaacctatcgcgcattgcacaacgaacatcggttgattgctgatgtggtctgttttcctggatgccatatcaaccacctgacgccacgtacgctggatattgaccgggtgcagagcatgatgcctgaatgcggaattgaacccaaaattctcatcgaggggccgccgcgccgcgaggtaccgattttactacgccagaccagctttaaagcactggaagagacggtgttgtttgcggggcagaaacagggcacgcataccgcgcgctttggtgaaattgagcagcgtggcgtggcattaacgccgaaagggcgacaactgtatgatgatcttctgcgtaacgctggaaccgggcaggataatctcactcaccaaatgcatttacaggaaaccttccgcacttttcctgacagtgagtttttaatgcgtcagcaagggttggcatggttccggtaccgtctgacgcctagcggtgaggcgcatcgtcaggcgattcatcctggagacgatccacagcccttaattgaacgtggttgggtagtggcgcaacccatcacctatgaagatttcttgcccgttagcgcggcggggatcttccagagtaatctgggtaatgaaacgcagacacgcagtcacggtaatgccagtcgcgaagcatttgagcaggcgttgggttgtccggttttggatgagttccagctttaccaggaagcggaagaacgcagtaaacgtcgctgtggtttgctttaaaatctgaccatccgcctttgcaaaaatttgcctgattttacaaacgaatcaggctcatcccatcgacataaaaaaaatgccgatttatgcatattctctcagttcaacaattggattattaataaatattgtctagagtgagcggtcataaataagcactttcttgccgctgaaaacgaccagcgcgggaccattcacaacaccagaaggactcactttcaggtatggatcgtagacgatttattaaaggttcaatggctatggccgccgtgtgcggtaccagcggcattgcttctcttttttctcaggcggcattcgcggcagattctgatattgccgacgggcaaacccagcgttttgacttctccattctacagagtatggcgcacgacttagcgcaaacagcgtggcgtggtgcgcctcgtccgttacctgacacgctggcgacaatgacgccgcaggcttataacagtattcaatacgacgccgaaaaaagcctctggcataacgttgagaaccgtcaactggacgctcagttcttccatatgggaatgggattccgtcgccgcgttcgtatgttttctgtagatccagcaacacatctggcgcgtgaaattcactttcgcccggagttgttcaaatacaacgatgcaggtgttgatacaaaacaattagaagggcaaagcgatctcggctttgccggttttcgcgtgtttaaagcccccgaactggcgcgccgtgatgtagtaagttttctcggcgcgagttatttccgcgccgttgatgatacatatcaatacggtttgagcgcccgcggcctggcgatcgacacttacaccgacagtaaagaagagttccccgactttaccgccttctggtttgatacggtaaaaccgggggcaactacctttaccgtttatgcgttgctcgatagcgccagcattactggtgcctataagttcactatccattgtgagaaaagtcaggtgattatggatgtggaaaatcacctgtatgcgcgcaaagacattaaacagctgggcattgcgccgatgaccagtatgttcagctgcggtactaatgaacgtcggatgtgcgatacaattcatccgcaaattcatgactctgatcgtctgtccatgtggcggggcaacggcgagtggatttgccgtccgctgaataatccgcaaaaattgcagttcaatgcttacaccgacaacaacccgaaagggtttggtttattgcaactggatcgtgacttctcccattatcaggacattatgggctggtataacaaacgcccaagtctgtgggtggaaccgcgtaacaagtggggtaagggcaccatcggcctgatggaaatcccaacaacgggcgaaacgctggataacattgtctgcttctggcagccagaaaaagctgtaaaagcaggtgatgagtttgcattccagtatcgtctgtactggagtgcgcaaccgcctgttcattgcccattagcgcgcgttatggcgacgcgtaccggcatgggcggtttcagcgaaggttgggcgccaggtgaacactatcccgaaaaatgggcgcgtcgttttgccgtcgatttcgttggtggtgatctgaaagctgccgcgccaaaaggcattgagccggtgattacgctttccagtggggaagcgaagcaaatcgaaattctctatattgaacccatcgatggttatcgtattcagtttgactggtatccgactagcgactccactgatccggtcgatatgcggatgtatctacgttgtcagggggacgctatcagtgaaacatggctgtatcagtatttcccgccagcgccggataaacgtcagtatgttgacgaccgcgtgatgagttaatcgttttttcttcggcaccttcttcgggaggtgccgtctggttaaacacgatcccgctcgcatttttccctaagttaaatgagtaatctgatggtgtgtatttcagatacaccttgtcagccactaacagggagtgcgtatgtttccagaataccgagatttaatatcccgtctgaaaaacgaaaatcctcgctttatgtccttgttcgataaacacaataaacttgatcatgaaattgccagaaaggaaggttccgacggtcgagggtacaatgcggaagtggtccgcatgaaaaaacaaaagctacagttaaaagatgagatgctcaaaatcctgcagcaggagagcgtcaaagaggtgtaaactttcctaagccgccagccaggcggcttttttaacaactgcatggattgactggagataagatgactgaaacgataaaagtaagcgaaagtcttgaattacatgctgttgcagaaaatcacgtcaaacctctttatcagttaatctgtaaaaataaaacctggttacagcagagcctaaactggccgcagtttgttcaaagtgaagaggacacgcgaaaaacggtgcagggtaatgtgatgttgcatcaacgcggctatgccaaaatgttcatgattttcaaagaagatgaacttatcggcgttatcagctttaatcgtattgaaccactgaataaaaccgctgaaatgggctactggctggacgaatctcatcaggggcaggggatcatttctcaggcgctgcaggcattgattcatcattacgcccagtctggtgaacttagacgcttcgtgatcaaatgtcgggtggacaatccgcaaagcaaccaggtcgctttgcgcaatggttttatccttgaaggttgcctgaaacaggctgagttcctgaatgatgcctatgatgatgtgaacttatacgcgcgtattatcgatagtcaataatcacaataaccctgccagcggcgttcgcgtaatgcgctcctcgccgttaatgacttttggaccacggacatgaaccgtgtcgccatcaaaggcttcaacgacggcgtggtcggttaactccacatggttttcaattatcaccgcacctgtaatacggctctcaccttgtatgacaacgtgctcgtcgagcagaatcggtccgccacgtaccacggcatttccgccaaccaagacatgatgttttaacacacaattaccttccacaatggcatattccgccacctggctactgtaatgaatcgtcggaatggcatcttcttctatgccagctttcacctgcgcgtgaccgtagactttagcgcaatcgcatagccagacattgttctcttcattaccttcaatactggcaaaatcaaaaacttcggcgcgatgttcaataaaagcataccggacgacggcatcgccataaatttgtgcctggtggacaatacggctggcgctaacccttgcgcgatcataaatttggagcaggagttgatggtcgggcgttaagccttgtgcggcgacgatcatagaatgttgatcaattaaggcgtgaccaaatattctacattgcccgtaaactaaactgtcatgaatggtgacgctgtcacttatatatgcaccctggctgatttcactattatcgatccagacgttatccgttgcgtaaacctctccccacagcacgctggtgccggtgatacgcgtattaccggaaatcaccgctccgccgaacgcaatagcattctggtcgtaaatccagcaatttccttcttgtgctaacaccgtttcgcgatcgatccagccgccagcggttcctgctatcacatcgttaaaatcgctaatggcgataatctgccgtaataacacattttttttagtgccatcttcctgataactaaaggctcgctgttcttcacttagacgatatttgcgcatagcgttttcccacaggtgacttactataaccgtagcaaattctgcggctctggctatgctcgagaaaattccataaaatgcatttcaaatatactttataaattaaacaaaatgagtaagaagatgcagagcgataaagtgctcaatttgccggcaggctactttggtattgtgttggggacgatagggatgggatttgcctggcgctatgccagccaggtttggcaggtcagccactggttaggggatgggctggtgattctggcgatgatcatctggggattattgactagcgcatttattgcccgactcatacgctttccgcatagcgtgctggcggaagttcgccatccagtgctgagcagttttgtgagtttgtttccggcaacgacgatgctggtggcgattggttttgttccgtggtttcgcccactggcggtgtgcctgttcagttttggtgtcgtggttcagttggcttatgccgcctggcaaactgcgggattatggcgcggatctcaccctgaagaagctaccacgcctggactgtatctgccgacagttgccaacaactttatcagcgcaatggcctgtggtgcgttgggctacaccgacgccggtctggtgtttttaggcgcaggcgttttcagttggctaagccttgaaccggtgatcttgcagcgtctgcgcagtagcggagaattacccacggcactgcggacaagtctcggcattcagctcgctcctgcgctggtggcttgtagtgcctggctgagcgtcaacggcggcgagggtgacacgctggcgaaaatgcttttcggttatggactgctgcaactgctgtttatgctacgtctgatgccatggtatctctcccagccatttaatgctagtttctggagtttcagcttcggcgtatctgcactggcaaccaccggtttgcatctggggagtggcagcgataatggatttttccatacgctggcggtgccgctgtttatctttaccaattttattattgcaatactgctcatccgtacttttgcgcttctgatgcagggaaaattgttagtcagaaccgagcgcgccgttttaatgaaagcagaggacaaagaatgatcattcgtgacgaaaactattttactgataaatatgaattaacccgcacacactctgaagtactggaagcggtgaaagtggttaaaccgggtaaaacgctggatctgggctgtggcaatggtcgtaacagtctttacctggcagccaatggttatgatgttgacgcatgggataaaaatgccatgagtatcgccaacgtcgagcgcattaaatccattgaaaatctggataatttacacacccgagtcgttgatctgaataacctcacatttgatagacagtacgattttattcttagcactgtggtgctgatgttccttgaggctaaaaccatccccgggttgattgccaatatgcaacgttgcactaaacctggtggttacaacctgattgtggcggcgatggataccgctgattatccatgtaccgtcggcttcccgtttgccttcaaagagggagaattacgtcgatattacgaaggctgggagagggtgaaatacaatgaagacgtcggcgagctgcaccgcaccgacgccaacggtaatcgtattaaactgcgtttcgccacgatgctggcacgtaaaaaatgacccggtaagcacaaaacgcgtgaaaattccccacgctgagatgatttactgttcttcttttcggtaagcatattttttatcgaagggatgtgaaattaatcacagtagtcgaagtttttagcagcttaacttactgaaatttaagtactgatgattgacttagcccctttttcggcattgactatgtcgtctgaaaaggggctgaaaaatttattttcaccaacactttttttgccacaacacgaagcggcgctttttgctataacttagaaagtaatataatcatctcaggaaactattcatgcgtaccacaagttttgcgaaagttgcagctttatgcggcttattggctctgtctggttgtgcatctaaaatcacccagccagataaatattctggttttttaaacaattactctgatttaaaagaaacaaccagcgctacaggtaaacctgttttacgttgggtagacccgagttttgatcaaagcaaatatgacagcatcgtctggaacccaatcacttattatccggtaccgaaaccgagcacccaggtagggcagaaagttctggataaaattttgaactataccaacaccgaaatgaaagaagcgatagcgcagcgtaaaccactggttaccaccgctgggccgcgtagtctgattttccgtggggccattaccggtgtagataccagcaaagaagggctgcaattctatgaagtggttcctgttgcattagtggttgcggggacgcaaatggctacaggccaccgtaccatggatactcgcctctattttgaaggtgagctgattgatgcagcgactaataaaccggttatcaaagtcgttcgtcagggcgaaggtaaagacctgaataacgaaagtacgccaatggctttcgaaaatattaaacaagttattgatgacatggcgaccgatgccaccatgtttgacgttaacaaaaagtaattccagacgcgccatcgttagatggcgctttttatccggtgcgccgtaaaaccccatccttcagggcggggatataaggcgcggttttccacctgaccaggtgtttgctgttgttcaatgtattggcggatgacggatattggcgcacctccgcagctactggcaaaatagccaggactccacaaaacgcctttgtagtaatacctgaatgcaatatctggtcgatctcgtcgcagtcacctacccgatacgcctttgaggctgtttaccagactggatatcgccagtttgggaggatagttaattaacaaatggacgtgatctggttcgccatccatttcaaccagttcagcttcaaaatcagcacatacatttgaaaagtaagtgcgtagtttttctgtcgcgtcatggtcaaaaatctggcgtcggtatctggtgacaaagagcaggtgaacatgcatcaggaaaacacaatgccttccacgccggatatcggtttcttttttcacagaccaaagtatcatttgacctgtgaaacgattacaggcatttaaattccagttaagacccggtggtcaacaggagtgtgaaatgaggcgcttcgcaggcgcatgtcgtttcgttttcaatcgtgctctggcacgtcagaatgagaatcatgaggccggtaataaatacatcccttacgggaaaatggcttcctggctggttgagtggaaaaatgccactgaaacgcaatggcttaaagattctcccagtcagccattgcaacagagtctgaaagaccttgagcgggcttacaaaaacttcttccggaagcgggctgcttttccccgattcaaaaagcggggacagaatgatgcattccgctacccgcagggcgttaagctcgatcaggaaaacagccgtatttttctgccgaaactgggctggatgcgctaccggaacagccgtcaggtcacgggtgttgtgaaaaatgtcactgtcagccagtcctgcggtaagtggtacatcagtattcagacagaaagtgaagtaagtactccggttcaccctagtgcaagtatggtcgggctggatgctggcgtggctaaactcgccacgctgagtgatggcacagtctttgagcctgtaaacagttttcagaaaaaccagaagaagctggcgagacttcagcgacagttaagccgcaaggtcaaattcagcaacaactggcaaaagcagaaacgcaaaatacagcgactgcattcctgtatcgcaaatatccgcagggactaccttcacaaagtcacaacggccgtcagcaaaaaccacgcaatgatagtcattgaggatttgaaggtcagcaacatgagtaagagtgcagcgggtacggtcagccagccggggcgcaatgtccgggcaaaaagtggtttaaaccgtagcatactggatcagggctggtatgaaatgcgccgccagcttgcgtataagcagctctggcgtggcggtcaggtgcttgctgttccgccagcgtatacaagccagcgttgcgcgtactgtggtcatacagcgaaagagaaccgcctgagtcaaagtaaattcagatgccaggtatgtggatatacagcgaacgccgatgtaaatggcgctcgcaacattttagcggcggggcacgccgttcttgcctgtggagagatggtgcagagtggccgcccgttgaagcaggaacccaccgaaatgattcaggcgacagcctgaacgtagcagggatccacgtccttcagggcgtggaggatgtcaatatcggtttctgtcagcgattaaattcaacaccacgtaacaaacgcctccggcaattaatccccaaaacgcagaaccaatcccgaccagcgtcaatccacttgccgttaccagaaatgccaccaccgccgcgtctcgctcacgctcattatgcagcgcctgatacaaactgccgccgatggtacttaacagcgccagacctgccagcatctggatccaacttacgggcagggcagccatcatcccggtaatggcactaccaaacagacctgcgagcaaatagaaaatgcctgcaacggcagcggccagccaacgttgatctttatccggatgcgcttccgggctttggcaaatagccgcggtgattgccgcaataccgacggaataaacgccgaaaggggaaaaaaccagtgccagcaatccagtaaatacaattaatgggctaacaggagcgctatatccagctgctttcattgctgcgatacccggtgcgttttggcttgccatcgtcaccagaaaaagggggagtgcaacgctcaggctgtgagcaaagctaaaatcaggggtaatataagtggggagaacgggtttaaagacaacatcagttgtgacaacgtcaccttgcgcgatgacgatcacgatcccaataatcatcgcggcaattaccgcatagcgcggcgcaacggccttggttgccagccataccagcaacatacttccacacaacgtaaattgaccgtccagactggcaaacgcctgtaaaccaaagcgtaataaaatcccggcaagcattgccgccgcaaggctgtgcggaataatgcgcatcagacgagcaaagagtcccgttatgccgcagaggactattagcgcgttggtgacaataaaaacgccgatggcttcgttaagtgttagtccctgcaatccggtgaccaacaaagccgcgccaggcgtactccatgcggtgagaacaggtacgcgataccataatgtcagagtcagcgtactgacgcccattgccagccccagcgccgtcatccagccagagatttgtgcagtggtggctccggcgacaatcgctgcttgccagattattgccgcactactggcgtagccaattaataccgccagaaaccccgccagtagcgtgggtggaggaatagaaaacagacgcatagtcacctcgtgcgttatagcgtacaggcaccgtagcatttgtccgttataacgcacaagtgataaacttccgttttgccggaggagtcgcatggaaaatctcgctcgctttttatccaccacacttaaacaactacgccagcagcgcggctggagtcttagccgactggcagaagcgacgggcgtttctaaagcaatgttagggcagattgagcgtaatgagtccagtccgacggtcgcgacattatggaaaattgccaccgggttgaacgtaccatttagtacatttatttctccgccgcagtccgctacgcctagtgtttatgatccacaacagcaggcgatggtgatcactagcctgtttccttatgatccacaactctgctttgaacacttcagcattcagatggcatctggtgcaataagcgaaagcacgccccatgagaagggggtaatcgaacatgtcgtcgtcattgatggacaacttgatctgtgcgttgatggggaatggcagacccttaattgtggggaaggcgttcgatttgctgcagacgtcacgcatatctatcgtaatggtggggagcaaaccgtacattttcattccctcatccattacccgcgcagttaagcgggaaaactatttcgcaacgtcgcgcttgtggctaaaatagccgccatttttcagctactggataagaatgtgaccgtatcttctcatcgacttgaactgttaagcccggcacgcgatgccgccattgcccgcgaagctattttgcacggtgccgatgctgtttatatcggcggccctggttttggtgcccgtcataatgccagtaatagcttgaaagatattgccgagctggtgccgtttgcccatcgttatggtgcaaaaattttcgtcacgcttaacaccattttgcatgatgatgagctggaacccgcgcaacggctgattactgacctctaccagaccggtgtcgatgcgctgattgttcaggatatggggattctggaacttgatattccgccgattgaactgcacgccagtacgcagtgcgacattcgtacagttgaaaaagcgaagttcctctctgatgttggcttcacgcagattgtgctggcgcgagagctgaatcttgatcagatccgcgcgattcaccaggctacggacgcgaccattgaattctttattcatggggcactgtgcgtggcctatagcggtcagtgctacatttctcatgcgcaaacagggcgtagcgccaaccgtggcgattgcagccaggcgtgccgtttgccatacacattgaaagacgatcaggggcgggtggtttcctatgaaaaacatctgctgagcatgaaagataacgatcagactgccaacctcggcgcgctgattgatgctggtgtacgctccttcaagattgaagggcgttacaaagatatgagctacgtgaagaatatcaccgcccattatcgccagatgcttgatgccattattgaagaacgtggcgatctggcgcgcgctagtagtggtcgtactgaacatttctttgttccaagcacggaaaagactttccaccgtggtagcacagattattttgtgaatgcccgtaaaggcgatattggcgcgttcgatagcccgaaatttatcggcctgccggtaggcgaagtagtgaaagtggcgaaagatcatctcgatgttgccgttaccgagccactggcaaatggcgatggcctgaacgtgttgattaaacgtgaagtcgtcggttttcgtgccaatacggtcgagaaaaccggagaaaatcagtaccgcgtctggcccaatgaaatgccagcagatttgcacaaaattcgtccacatcacccactaaaccgtaatcttgatcataactggcagcaggcactgacaaaaacctccagcgaacgtcgggtggcggtagacattgaactgggcggctggcaggaacaactgattctgaccctcaccagtgaagagggtgtcagcatcacgcatacgctggacgggcagttcgacgaagccaataacgccgaaaaagcaatgaacaatctgaaggatggtctggcaaaactggggcaaaccctctattacgcccgcgatgtgcaaattaatttgccgggggcgctgtttgtaccaaacagtctgttaaaccagttccgccgtgaagctgctgacatgctggatgctgcgcgtcttgccagttaccagcgcggcagccgtaaaccggttgctgatcctgcgccggtttatccgcaaacgcatctgagtttcctcgcgaacgtatacaaccagaaagcgcgtgaattttatcatcgctatggtgtgcagctgattgacgcggcgtatgaagcacatgaagagaagggcgaagtcccggtgatgatcaccaagcattgtctgcgctttgcctttaatctgtgcccgaaacaggcgaaaggcaatatcaaaagctggaaggcgacgccaatgcaactggttaacggcgatgaagtattaacgctaaagtttgattgccgcccatgcgagatgcacgtcattggcaaaatcaaaaatcacatactgaaaatgccgttaccgggaagcgtagtggcatccgtaagtccggatgagctgctgaaaacattgccgaagcgaaaagggtaaaacgccagttttctggttactcacaacttattgaatctgcatgatattgcctgccgggtaaggcgttacgccgcatccggcatcaaatgactcaacgttgtcccgcttctggtttgcggcttttttgccagtaaaaatgctcgcgcaaaccttccgcgctctcttccgccacagcacgcaattcatcgctgtccgcttcatgacgcagctgatgatccacattctttacccacacaaattcatgtcctttgtgccctgccatgagttgtccactaaacagagcacacgttaataagacaacgcttaacgccttcgtaaacatcctgccacctttttcttaccttttgccgctatgatgccgatcgtttcttgaggttattattcagttttgcaaattagcgcaaagaaattctggaatcttccttcctgattttgcattgcattctgccgttgcggcgatttagtgctattttcgagcaaattacacacggaggtaaacactaatgtttactttgttgatatactcagcggcagggaggcgatgtgaaacaaagcgagttcagacgttggctcgaatctcagggcgtcgatgtagcgaatggcagcaaccatttgaaactcaggtttcatgggaggcgcagtgtcatgccgcgtcacccctgcgatgagattaaagaaccattgcgtaaagcaatcctgaaacaactcggtttgagttaatcgccaattaaaaaggttaatgacatgcgagagacagtcgaaattatgcgttatcccgtcactcttacacccgcgccggaaggcggttatatggtttcttttgtggatatccctgaagcgttgacccagggcgaaactgtcgctgaagcgatggaagcggcaaaagatgctttactgaccgcatttgatttttattttgaagataacgagcttatccctttacctagcccattaaatagtcacgatcactttattgaagtacctttgagcgtcgcctctaaggtattgctgttaaatgcttttttacagagtgaaatcactcagcaagagttagccaggcgaattggcaaacctaaacaggagattactcgcctatttaacttgcatcatgcgacaaaaatcgacgccgtccagctcgcggcaaaggcgcttggcaaagagttaagcctggtgatggtttaattacagttaacgaaaagttgtcatttttaacaactgatatagactgccgaatcatctgcacataattacgattcgataatgaaaaaataccagcagcttgcagaacaattacgcgagcagattgcgagcggtatctggcaacccggcgatcgtttgcctagcttgcgtgaccaggtggcgcttagtggcatgagctttatgactgtcagccatgcctatcagttgctcgaaagtcagggatatattatcgcacgaccgcagagcggttattacgttgcgccacaggcaataaaaatgccgaaagcgccagtcattccagtcactcgagatgaagcagtcgatatcaacacttatatttttgatatgttgcaggccagtcgcgatccgagcgtcgttccgtttgccagcgcctttcccgacccgcgacttttccccctccaacaactaaaccgcagcctggcgcaggtaagcaaaaccgccacagcgatgagcgtgattgaaaacttaccgccaggaaacgcagaactgcgtcaggctattgctcgtcgctatgccttacagggcatcaccatttctcctgatgaaattgtcattactgccggggcgttagaggcattaaacctcagtttgcaagcggtaactgaaccgggcgattgggtgatagtagagaatccttgtttctacggtgcgttgcaggcgctggagcggctacggctgaaggcgttaagcgtggcgacggatgttaaagaagggatagatcttcaggcgctggaactggcgttgcaggagtatccggtgaaagcgtgctggctgatgactaatagccagaatccactcggatttaccttaacgccgcaaaaaaaagcacaactggtggcgttgctcaatcagtacaacgtaacgctgattgaagatgacgtttacagcgaactttattttggacgggaaaaaccgctgcctgcgaaagcgtgggatcgccacgatggcgttttgcattgctctagctttagcaaatgtctggtgcctggttttcgtattggttgggtcgccgccggaaaacatgcacgtaaaattcaacgcttgcagttgatgagtacgctttccaccagcagtccgatgcaacttgcgctggtggattacctttccacgcgccgatacgacgcccatcttcgtcgcctgcgtcgccagcttgcggaacgtaaacaacgtgcctggcaggcactgctgcgttatctgcctgcggaagtgaaaattcatcataatgacagtggttactttctctggttggagctccccgagccgttagatgccggcgaattaagcctggcggcactgacgcatcatatcagtattgcgccgggtaaaatgttttctaccggtgaaaactggagtcgttttttccgttttaataccgcgtggcagtggggagagcgtgaagaacaggcggtaaaacaattaggcaaacttattcaagaacggctgtaatagcgtttaatttaattcctcttagattgggtaatatgaatttcgaatagcagtcatatttcctaactccttgactatactccagaagataaccttacagacggcataatgcgcggtagctcacaacctgaataaattttctcaggggcgaaggtgtgcctgcaagccgccgtctatggttaaacaaggagatatttttacggcacggcggctgaacaattaattacgacaggagtaagaccttatgagcaagacatttgcccgcagcagcctgtgtgcgctcagcatgacaataatgaccgctcacgccgccgaaccgcctaccaatttagataaaccggaagggcgactggatattatcgcctggccgggatacatcgaacgcggacaaactgataaacaatacgactgggtaacgcagttcgaaaaagagacaggctgcgcggtgaatgtgaaaaccgccgcgacttccgatgaaatggtcagtctgatgaccaaagggggttacgatctggttacggcatccggcgatgccagcctgcgtttgattatgggtaaacgcgtgcagccgattaataccgcattgattcccaactggaaaacgctcgatccgcgcgtggttaaaggcgactggtttaatgttggcggcaaagtttacggcacaccttaccaatgggggccgaacctgctgatgtacaacactaaaaccttcccgacgccgccggatagctggcaagtggtttttgttgagcaaaatctgccggacggcaagagcaataaaggccgcgttcaggcttatgatggccctatctatattgcggacgctgcgttgttcgttaaagccactcagccgcagttgggcatcagcgatccgtatcaactcaccgaagaacagtaccaggcggtgctgaaagtgctgcgcgctcaacacagtttgatccatcgctactggcatgacactaccgtgcaaatgagcgatttcaaaaacgagggtgtggttgcttccagtgcctggccctatcaggccaacgccctgaaagccgaaggccagcctgttgctaccgttttcccgaaggagggtgttaccggttgggctgataccaccatgctgcatagcgaagcgaaacatccggtttgcgcctacaaatggatgaactggagtttaacgccaaaagtgcagggcgatgtggcggcctggtttggcagcttaccggtagtgccggaagggtgtaaagccagtccgttattaggcgaaaaaggttgtgaaaccaacggttttaactatttcgacaaaatcgccttctggaaaacgcctatagcagaagggggcaagtttgttccctacagtcgctggacgcaggattacattgccattatgggcggtcgctaacttcgctggggtgctttatgacgtacgcagtggagtttgacaacgtcagccggttgtacggtgacgtgcgcgcagtagatggcgtcagtattgcgataaaagatggtgagttcttctctatgctggggccgtccggctccggcaaaaccacctgcctgcgcctgattgctggcttcgaacagctttccggcggggctatctctatctttggtaaacccgccagcaatctgccaccgtgggagcgggacgtgaatactgtctttcaggactacgcgctatttccgcatatgagcattcttgacaatgtcgcctatgggctgatggtcaaaggcgtgaataaaaagcagcggcacgcaatggcgcaagaggcgctggagaaagtggcgttggggtttgtacatcaacgtaaaccgagtcaactttctggtggtcagcgccagcgggttgctatcgccagagcattggtgaatgaaccgcgcgtattgctgttggatgaaccgctcggcgcactggatctcaaattgcgtgagcagatgcagctggaactgaaaaaactgcaacagtctctcggtatcacttttatcttcgttacccacgatcagggcgaagcgttaagcatgtccgatcgtgtggcggttttcaataatggacgcattgagcaggtcgattccccgcgcgatctctatatgcgcccgcgcacgccgtttgttgccgggttcgttggtacaagcaatgtttttgatggactgatggcagagaaactttgtggcatgacgggaagcttcgccctgcgaccggaacatatccgcctcaacacccctggtgaactgcaggccaatggcacgatccaggcggtgcaatatcagggcgcggcaactcgttttgaactgaaattgaacggcggtgaaaaactgcttgtgagtcaggccaatatgacaggcgaagaactgcctgccacgctcacgcccggacaacaggtgatggtttcctggagccgtgatgtgatggtgccgctggttgaggagaggtgaatggcgatgaatgtattgcaaagtcctagtcgtccaggtctgggtaaggtgtccggtttcttctggcataatccggggctggggctgtttttactgctgcttggcccgctaatgtggtttggcattgtctatttcggcagcctgctgacactgttatggcagggattttatacttttgacgatttcaccatgagcgtaacgccggaactgacgctggcgaatatccgtgcgctgtttaatccggcgaattacgacatcattctccgcacgctgactatggctgtggcagtcactatcgccagcgccattctggcttttccaatggcgtggtatatggcgcgctataccagcgggaaaatgaaagcgtttttttatattgcggtaatgttgccgatgtgggcgagctacattgttaaagcctatgcctggacgttattgctggcaaaagatggcgtggctcagtggtttttacaacatcttgggctggaaccactgctgactgcgttccttacattacctgcggtgggcggaaatacgctgagtacttccgggctggggcgctttctggtgtttctctatatctggttgccgttcatgatcctgcccgttcaggcggcgcttgagcgtttgccgccgagtttgttgcaggcgagcgctgatctcggcgcacgtccacgacaaacctttcgctatgtggtgctgccgctggcaatcccgggtattgccgctggctctatctttaccttcagtctcacactgggcgattttatcgtcccgcagctggttggtcctccaggatattttatcggcaatatggtttattcccagcagggggcgattggcaatatgccgatggcggcggcattcaccctggtgccgattattctcatcgcactgtacctggcgttcgtgaaacgtctgggagcgttcgatgcactctgaacgcgcaccgtttttcctcaaactggcggcctggggcggcgttgttttcctacattttcccatcctgataatcgccgcctatgcgtttaacactgaagatgcggcgtttagttttccaccgcagggcctgacgctgcgctggtttagcgtggcagcacagcgtagtgatattcttgatgccgtgacactgagtcttaaagtggcggcgctggcgacattaattgcgctggtgttagggacgctggcagctgccgcgctgtggcgacgagactttttcggcaaaaacgccattagcctgttactgctgctgcccattgcgctgccgggcattgtcactggtctggcgttattaaccgcctttaaaaccatcaatctggagccgggatttttcaccatcgtggtcggtcatgcgactttttgtgtagttgtggtgtttaacaatgtcatcgcccgttttcgccgcacctcctggagtctggttgaggcgagtatggatcttggggccaatggctggcaaaccttccgctacgtagtgttgccgaatctcagtagcgcgttactggcaggaggaatgctggcgtttgccttgagcttcgatgaaatcatcgttacgacctttacggcaggtcatgaacgaacgttaccgttgtggttgctcaatcagcttgggcgaccgcgtgatgtaccggtaactaacgtggtggcactgctggttatgttggtaacaaccttgccgatcctgggggcctggtggctaacccgcgaaggcgacaatggtcaataaccactgatacaggaatatgctatgcaacataagttactgattaacggagaactggttagcggcgaaggggaaaaacagcctgtctataatccggcaacgggggacgttttactggaaattgccgaggcatccgcagagcaggtcgatgctgctgtgcgcgcggcagatgcagcatttgccgaatgggggcaaaccacgccgaaagtgcgtgcggaatgtctgctgaaactggctgatgttatcgaagaaaatggtcaggtttttgccgaactggagtcccgtaattgtggcaaaccgctgcatagtgcgttcaatgatgaaatcccggcgattgtcgatgtttttcgctttttcgcgggtgcggcgcgctgtctgaatggtctggcggcaggtgaatatcttgaaggtcatactagcatgatccgtcgcgatccgttgggggtcgtggcttctatcgcaccgtggaattatccgctgatgatggccgcgtggaaacttgctccggcgctggcggcagggaactgcgtagtgcttaaaccaagtgaaattaccccgctgaccgcgttgaagttggcagagctggcgaaagatatcttcccggcaggcgtgattaacatactgtttggcagaggcaaaacggtgggtgatccgctgaccggtcatcccaaagtgcggatggtgagcctgacgggctctatcgccaccggcgagcacatcatcagccataccgcgagctccattaagcgtactcatatggaacttggtggcaaagcgccagtgattgtttttgatgatgcggatattgaagcagtggtcgaaggtgtacgtacatttggctattacaatgctggacaggattgtactgcggcttgtcggatctacgcgcaaaaaggcatttacgatacgctggtggaaaaactgggtgctgcggtggcaacgttaaaatctggtgcgccagatgacgagtctacggagcttggacctttaagcagcctggcgcatctcgaacgcgtcggcaaggcagtagaagaggcgaaagcgacagggcacatcaaagtgatcactggcggtgaaaagcgcaagggtaatggctattactatgcgccgacgctgctggctggcgcattacaggacgatgccatcgtgcaaaaagaggtatttggtccagtagtgagtgttacgcccttcgacaacgaagaacaggtggtgaactgggcgaatgacagccagtacggacttgcatctagcgtatggacgaaagatgtgggcagggcgcatcgcgtcagcgcacggctgcaatatggttgtacctgggtcaatacccatttcatgctggtaagtgaaatgccgcacggtgggcagaaactttctggttacggcaaggatatgagtctttatgggctggaggattacaccgtcgtccgccacgtcatggttaaacattaaggataatattgcagatcgtaagagtatgagatgatcttgcgtactgtcagagcactgatttctctgacagtacgtgctgcgtgcaaaatcactacatcaaataaaccagccaaatctcatagagataagagtaaacaaaccaacagcagcaaagaaatttatcagtactacagttctactggaaacattcatttttgccaccttttatcattgcccctatgtgtatagtacgggttaagaaaatccgcaataatactcattctgaagatggataagggcaagttgctgtttgatgattttttctcaaactggtgaaaaaacttgatgcacgtcaaaaaatgacgcatatttgcgcgcgttttattcatctggctggacgcccgtacatgtctctctatcaacacatgcttgttttttatgcggttatggcagcaatcgcatttcttatcacctggtttctttctcacgataagaaacgcatccgtttcttaagcgcctttctggtgggggcaacatggccgatgagtttcccggtggcgctgttgtttagtctgttttaaatcttactcactggcttgacggcaccacgcagacttatatcatttggatgaatcgataaatttcacaagtggctaaggagaaagtatgagccatctggatgaagtcatcgcgcgcgtggatgccgcgattgaagagagcgtcattgcccatatgaacgaattattaatcgccctgagcgatgacgcggagttaagtcgggaagatcgctacacccagcagcaacgtctgcgcacagcgatcgcccatcacggtcgcaagcataaagaagatatggaagcgcgccacgaacagttaaccaaaggcggcaccatcctctgattaaaaactgcgtctggctaccaaccaggcgccaaccacaagtaaaattgcgccacaaattgggccgaacaacgcccgtagtggtacgccatgactgcggaagatatccagcatcagaccgccaatcagctgactggcgaccagtacagcaatagttgtcgccgctcccacattctgatatccgctgatactggcgaagacaaaaaagcttcccagcaagccaggtataagtgtccaccagcgcacgctggacaccagttcgccaaaccccgccatgccttgtttaaaccataaaatagaaacaaagagcacaatccccaccagactgttcagcaacatggcgatgagaatggtagaggaggtctgggtgatgcgcaccatcagcgtgttctggacaaccagaccaattccggcggcaatcaaaaaagcaagggtgaggctctgattcatccaatcgcgtccggttcagtgcgctcgtcgagttgcaactgcataaatgtcagatccagccaacgaccaaatttagtgcctacctgcggcatttgcgcggtgacgacaaatcccaggctctggtggagatgcaggctggcctgattttggctttcgatcccggcgaccatgacatgcttcccgcaatcccgcgcttcatcaatcaatcggcttaacaatttacgccccagacctttgccctgatgatcgggatggacataaacgctatgttccacggtatggcgaaaaccatcgaaactacgccagtcgccaaagctggcatatcccgtcactacgccgttttcctcgctcaccagcactggataacctgctaaagtccgcgcttcaaaccaggcaatgcggttatcagcatccaccgtttggtcattccagatagccgccgtatacaacacggcgtggttataaatttccgcaatggcagcacagtcggctttgcgggcaaaacggatggacatgtctggcctcaataaaataatgatgatgatgttatcaatactatcgaaaacagcccgaagcaacggattcctcgatgaaattattgcgtgttgcagaggggatgtgacggctgcaaacaaaaccaatcccgtgagcctgctactattgatggattcatgccaaaagcacaggagagcattatggggcaacaaaagcagcgtaatcgacgttgggttctggccagccgtccacatggcgcacctgttccggagaatttccgtcttgaagaagatgatgtcgccacaccgggtgaaggacaggtgttactgcgcacagtttatttgtccctggacccgtatatgcgtggacgtatgagcgatgagccatcttatagtccgcctgttgatattggcggcgtgatggtcggcggtacggtgagccgtgtcgtggagagcaatcatcctgattatcagtctggcgactgggtgctgggctacagtggatggcaagactatgacatatccagtggtgatgatctggtgaaacttggcgatcatccgcaaaatccaagctggagcctgggtgtgctagggatgccaggctttaccgcttatatgggcctactggatatcggtcagcctaaagagggcgaaacgttggtggtagctgcggcgacaggaccagtgggggcgacggtggggcaaatcggcaaacttaaaggttgcagagtggtgggggtagccggtggcgcggaaaaatgccgccatgctaccgaggtgttaggcttcgatgtttgtcttgatcaccacgcggatgattttgccgaacaactggcgaaagcgtgcccaaaaggtattgatatctattatgaaaacgtgggcggtaaggtattcgatgcggtgctaccgttacttaatacatctgcgcgcattcccgtctgcggattagtgagcagctataacgctacagagctaccacccggtccggatcgtttacctctgttgatggctacagtgctgaaaaaacgtattcgcttgcaaggttttattatcgctcaggattatggtcaccgcatccatgagtttcagagggagatggggcaatgggtgaaagaggataaaatccactaccgcgaagaaattactgacggtttagagaatgcgccacagacgtttatcggcctgctgaagggtaaaaacttcggcaaagtggtgatccgcgtggcgggtgatgattaaagtttcaacggcggcgtaagccgccataaaaatccaggcaaaaagcttattttcagctttaattaactaaccacatcattgttctgctgctaataacaacaaaggtgagtggtttatgattattcactttaatacaccaggtgaattccttctgccatgcaggcagggttggacagaaaacacgcgaaggaattaaaatgcctggaacgggaaaaatgaaacatgtcagtttgactctgcaggttgagaacgacctgaaacatcagcttagtattggcgcattaaaacctggcgcacgcctgattactaaaaatctggcggagcaattaggtatgagtattacacctgtgcgtgaagcattattacgtctggttagcgtgaatgcgctttctgtcgcacctgcacaagcatttacagttccggaagtggggaaacgtcaattagacgaaatcaatcggatccgctacgaactggaattaatggcagttgctctggctgttgaaaacctcaccccgcaagaccttgcggaactccaggaattgctcgagaaattacagcaggcgcaagaaaagggcgacatggaacaaatcattaatgtaaacaggctatttcgcttagcgatttatcatcgcagtaatatgcccatcctgtgtgagatgattgagcaactgtgggtcaggatggggcctggtttacattatctctatgaagcgattaatccagcggaattacgggagcatatagaaaactatcatctgttactcgctgcgttaaaagcaaaagacaaagagggatgcagacattgtcttgctgaaattatgcaacaaaatattgctattttataccagcaatacaatcgttaaagtaaatgcccggcaaataccgggcatcaaggtaattactcaaatctccacgcaatattcatgccgacaccataatttcgtccggggctaggttcgtaatatcgcccgttactctcattgacaatgacagaaccaacgtattctttatcgaataaattatcgacacgaccaaataaatccacagttaaattgtggtaattgtatttatacccggtgaataagccgacgagagtataagacggcgcttttgccgtattttcatcatctgccataatatcgcccatataacgcgcttccgtgcctgcataccaaccatcttccggtacataacctatgctcgcaaagcccatattacgggcgatccctggcatccgattaccgttacaatcctgttcattgcaaacattgctgcgataggtcgcatcaagccaggtccaggacgcgtttacgcgaaaatctcctgcgaaacgttgatcccatgccagttcagcgccttgacgacgggtctttccggcatttttgtaagtcgtacgcccaccgctactgctatcgacaacaatttcatcatcagtgtcggtctgaaacaatgcgagactaagcagcccatcaccaatacgcgttttactgccgatctcaattgtatcgttggtggatggttttaaacctaagttcataccgctttgcccatcagcacgataagacagctcattaatcgtcggcgtttcaaaacctcgcccggctgccagatagatattccaggcatcggtcattgcatattttaagctaccggcaggtagccatttatgataactggcatcaccgctgtcatcgccgttacccggagtaacgtaatggtcgttggaatcaaaccacacggagctgtagcgcacgccagcatccaggctcagtttttcgctcagctgccactgcgtctgtaaatagggatcgatgttccacatcagattgcgttcgtcgcgacgcaactcacctttttgcccgtactccggcatgccgctattcaggcggaagttattgtagcccttgcggttttcactcatgttttcgtagttcaggccggtagtgaacgtgaccggaacgcccagttcaccacggtgtgtccagcggctgtctattccctggtaatggcgttgcagggtaatcacgccgcccgcatgactcgggttaagttgtggtgccatgggtatactctggtactgggtcgtttctcgctctccggcatacatcatcacactcatatcatcccggctactcaggctacgctcatagcgcaacccagcctgagtttgcttgatggtttttcgcgtgtcgtactgttctgcacgaggcgcttgttgtggattagccttccattctgctttggttagcccacctgggtcatctgctttgatatccacactattgaaaatcagacttaatttgctggcttcatcaatgcgtacgcccagtttggcattggctaaatttttctgtgcgccactatggtcacgatagccgtgggtcgtaaaacgcgtggtactgacggtgtaatcgacatcgccaggctgtgtgccgtctcccgttgcgcccgttgctttcagcccatagcgccagctgccaaaactgccgtagtaactactggcttcaatggttggtggctgttgtccggtctgggtggtgacattcattaccccaccagacgcgttgccatacagggcagagaaggggccacgcagcacttccacattttgcacactgcttaaatcgatgttggatgtttgcccttgcccgtcgggcatggtggcgggaataccgtccacatacaggcgaataccgcgaataccgtaagtggagcgggagccaaatccgcgaatgctcagctgtaaatcttgcgcatagttctgccggttttgtacctgcaaaccaggcacgccggtcagactttcggacaagttaatgcgcggtgttgccaggcgcatctcctcgccatccaccacgcttactgctgctggggtatccagttcactaaccacctgcggtgcggcactgacaatcatagtctgttcatcagcggcaaaaacaacgggggaaaggacaagcagtgcgggcaaaacggtctgtcggacggaaaaaatcttcatgaaaaaagccaggttaagaatgggaaaacgccgtcatggtaatgaaattgtaaatttatggaaaatgaaacggcacaatacgttaagtaattgagaaaattgtagtcgtaacggcaagaaatgctccacatttgagaaaataatgattaccattcccatttataacaagagcgtaacgatgattacgcttagcgaagcattgtgaagcagcaaaaatatcggttcatcaaagggagtcgtcatgcatttacgtcatctgtttagtagccgcctgcgtggtagtttactgttaggtagtttgcttgttgttagtagtttcagtacgcaggccgcagaagaaatgctgcgtaaagcggtaggtaaaggtgcctacgaaatggcttatagccagcaagaaaacgcgctgtggctcgccactagccaaagccgcaaactggataaaggtggcgtggtttatcgtcttgatccggtcactctggaagtgacgcaggcgatccataacgatctcaagccgtttggtgccaccatcaataacacgactcagacgttgtggtttggtaacaccgtaaacagcgcggtcacggcgatagatgccaaaacgggcgaagtgaaaggccgtctggtgctggatgatcgtaagcgcacggaagaggtgcgcccgctgcaaccgcgtgagctggtagctgacgatgccacgaacaccgtttacatcagtggtattggtaaagagagcgtgatttgggtcgttgatggcgggaatatcaaactgaaaaccgccatccagaacaccggtaaaatgagtaccggtctggcgctggatagcgaaggcaaacgtctttacaccactaacgctgacggcgaattgattaccatcgacaccgccgacaataaaatcctcagccgtaaaaagctgctggatgacggcaaagagcacttctttatcaacattagccttgataccgccaggcagcgtgcatttatcaccgattctaaagccgcagaagtgttagtggtcgatacccgtaatggcaatattctggcgaaggttgcggcaccggaaagtctggctgtgctgtttaaccccgcgcgtaatgaagcctacgtaacgcatcgtcaggcaggtaaagtcagtgtgattgacgcgaaaagctataaagtggtgaaaacgttcgatacgccgactcatccaaacagcctggcgctgtctgccgatggcaaaacgctgtatgtcagtgtgaaacaaaaatccactaaacagcaggaagctacccagccagacgatgtgattcgtattgcgctgtaatagatatggcgagggtgaaaacggtgagacttgcctgccttttatcacggcgtatccggcactttcgtcagtaatctgaatttgcccggcacgtagccgggcaattttgcaattaactcgccgtttcaggcttaaacacaatttcctgtttttcttcatcttcctcgacgactggcgcagtgctgtgaatttcagcaacgcgtttgcgcacaccaaaccagcctataaccagcaaaataccgataatcggcagcgccgcgatagtataagtcccgttcgggtaatcgaacgccatcagcacaaggacactcagtaaaaacagtaatgtcagccaggaagtgaagggcgcgccaggcagtttaaaactgacatccgctgctttgccttctttaatcgctttacgcaggcgcatctggcacacgatgataaacgcccaactagcgatgattcccaggctcgcgaagttcaacacaatctcaaatacgcggctcggcaccagatagttgaggaatacgccgacgacatacacaactagtgtcgccagaatcccggcatacggcacatgctgacgactcattttcgccataaaactcggtgcggaaccgcccatcgccatactgcgcagaatacgtccggtgcagtacagaccactattcaggctggagagggcagcggtcagcaccacaatgttcataatgctgccgatatatggcacacccagtttagagaaaaacgtcacgaacggactttgccccgcctgatacgcgctccacggcaataacataaccagcaacaccacggagccgacgtaaaacaggccaatacgccaaatcacactgttaatggctttaggcaccatggtctgcggatctttacattctccggcagctgtacccaccatttcaatggaggcaaaagcaaacactacgccctgaatcaacaccagcgcaggcagcaaaccgtgggggaagaagccgccattatcggtgattaaatgaaagccagtggtgttgccatccagcggctgaccactaccgaggaacactgtacccacgaccaaaaaggtcacaatggcgagcactttaataagcgcaaaccagaactccatctccgcaaaccatttcacaccgatcatattcatggtgccaacgatggtaagtgcagcgagcgcaaagacccactgcggcacgccgccaaacgcaccccagtaatgcatatacagagcgacggcggtaatatcaacaatccccgtcatcgcccagttgatgaagtacatccagccagcaacataagcggctttctcacccaaaaactcacgggcataagaaacaaaactgccactggaagggcggtgtagcaccagctcacccaatgcacgcagaataaaaaagctaaacaagccacaaattaaataaaccagtgccagtgcgggccccgccatttgcagtcgggctcctgcacctaaaaacaagccggtgccaatcgcgccgccaatggcgatcatctgcacctggcgattgcccatcgctttgtgatacccctcttcgtgggcattaagccagcggcgtttcgcggcgtgttgatcactagtgtcggtgtcgtgtttactcattgctctccctgattgctttaatgaaaaagtcatataagttgccatgaacaatgtttattcatcctggcgatgatagttatcaccattattctttatgggtataaaactatcggcgcagcatcctacccgttatcgataaacgatgcaaaacatccccttacaatcctgaaggggattaatacaactgacgaaaaaatgacaaatccttttgctggttaacctgtgtactgtcctacacttaatctttaaaagattgtgaggggcatatgattaaggtgtatggcgtacccggatggggctctacaatcagtgagctgatgctaacactggctgatattccttatcagttcgttgatgtcagtggttttgaccacgagggagctagtcgcgagttattgaaaaccctgaacccgttgtgtcaggttccgacactggcattggaaaatgacgagattatgacggagacagcggcgattgcattgatggttctcgatcgtcgcccggaccttgcgccaccggttgggcgcgccgaacgtcagctgtttcaacggctattggtctggctggttgctaatgtctatccaacattcactttcgccgattaccctgagcgttgggctcctgacgcacctgaacagttaaagaagaatgttattgaatatcgaaaaagcctttatatctggttgaatagccagctcactgctgaaccttatgcgtttggtgagcaactaacgctggtggactgttatctttgcactatgcgcacatgggggcctgggcatgaatggtttcaggataatgccacgaatatcagtgcgattgctgatgctgtatgtcagttaccgaaattacaagaagtattaaaaaggaatgaaattatttgagtgggataccagaagattatgttatttattattcagtaactttatccacaatgatgggcgtaattaattaaattcatggtatgttttttaatttatatcactctccttttcattcagcgtgtctatttcatttcctctgaaaagaaactaactattcacatcgtgcagatgtttcagttgttaagtcaggcattctataatctcaaaatgtttttaatgatggatatgctcggagttggagatgcaattaatattaatacaaataaaaatatccggcaggtatgctaaaaggataaatggcgttctctgtatttattcgcaattatctgtaggacaaatatggagagcttgatgagtcagagctaaaacagcaattgattaataaacatgttgatttattcaagaaaatggatgtattttaaatgttgattcttaatataacctaatcaatagattatcaagtgagagctacacattattggaggggcaggggaaaacaccattttgggaacaatgcatcaggtactcttaccactgaagcaagatcatccggcaccaggtggtggtgcagtgctttggaaatggtcccctcgggggagttgtcattattttctatgctatttgcttattatattcatcaggtgaatttaataaattcctaatttgaaatatccactattaagctagtgtttaacgacgttaagatggcaatgtgcagatcatgttatcagggtggggcggtagcgtatattccttatacaaaccatcattcatttcaatgattgttattgaattatttattgttgtgaataaaaagacattatgaatattggtttgactttgcatatcaggttttttattactcgctgtaatgtacgagcctgtcgtgaataacgtcgagaacccatccgttgcgtttgtgattattttgttgactaaacagacacccgtttctctgaagtaaaatcccagactaaatcatcacataaccatgacatttttctgatattccccggtaacgccagataacgatgccaaatttaccgttatgttcaatcaactccctggtccatgtcgatttatctaccacaatcgccacgcgtggaggttcaaactccaccggcattgaccaggctgcagccataatgttacgccgctgggattgctcatcgaaactggtgatcaagaccgttgggccatgatttaacagacggctggcatggtgtaattctatggggatgaatcggctcatggtatcgcctcgcgaagaaggtttttttaagcgtagtccgtaacgcaataagtaacgaaattaacgggattggcgatttgcgaacgtgatgcatgtccgcgatcgcacaaaatagccggtgcggcgtctattccaggttataagttgagaaaaccactaagggaaacgcctgatgacgcccattctgaatcactattttgcccgtattaactggagcggagctgctgcggtcaatattgatacgcttcgtgcattgcacctgaaacacaattgcaccattccgtttgaaaacctcgacgttttgctgccgagggaaatacagcttgataatcaaagcccggaagagaaactggtgatagcccgtcgtggcggttactgttttgagcagaatggcgtgtttgagcgggtgttacgcgagctggggtttaacgttcgcagcttgttagggcgcgtagtgttaagtaatccgccagcattaccgccgcgcacccatcgtttgctgttggtggaactggaagaggaaaaatggattgctgatgtcggtttcggtgggcagacgctaaccgcgccgattcgtttagtttccgatctcgtgcagaccacgccacacggagagtatcggttgttgcaggagggtgatgattgggtgttgcagtttaatcatcatcagcattggcagagcatgtaccgttttgatctctgcgagcagcaacaaagcgattatgtgatgggcaatttctggagcgcgcactggccgcagagccattttcgccatcatttgctgatgtgccgccatttgccggacggcggcaagctgacactgaccaattttcattttacccattatgaaaatgggcacgcggtggagcagcgaaatctaccggatgtggcgagtttatatgctgtgatgcaagaacagtttggtctgggcgtggatgatgcgaaacatggctttaccgtggatgagttagcgctggtgatggcggcgtttgatacgcacccggaggcgggaaaataatttatgtcaggttgccggatgcggcgtaaacgccttatccggcatacattagcccggttgtagacctgacaggcgaagcgcatcagacaacggtttcagagttcaattgcccattcggcatgaaacaaaatcaccgctgtgccactaatggtgactttttccggttggttatcacgaattgtcaccgtcacttcaatcataccgtcacgccccaatgcgcgcccctgatggcctttaacacgcaacacgttgccatcgtggggcaatacgttgtgatgtaccaaccatgcacccatcgggccattggcattgccagtcaccggatcttccacaataccaatcgcagggctgaacatgcgaccatcggtttcgtttttgcctgggcggatctggaacgggaagaaaccattgcagccaatctttttgctgatagcggtcagcgcattaaggtcagggctaagggcgtcgatatccacttccggtttcagtgggatcatcactttactgtgtcctgttgttgccacctgaattggcaagcctggcagaatatcgtcctcagtgagatgaagcgcgttgataatcgccgcacgtgtttcaccttccagcggtggctcaaagcccggcgtaccttgttccaggctaatacgataatcatcgttgtgcttttcgatagtcacgcgatgttttcctgccaggcttgtttgccagatcgtgcaatttcctaaacctaacaccttcgcacgtacatagtgcgcagctactgtcgcgtgaccgcaaatcggcacttcaaccgttggcgtaaagtagcggatgcgcacatcgctgtcgtcgctgtgcagcagaaaagcagtttcgctatggcctaactcgcgggcgataagctgcatttgcgcttcgctaagattatcggcggggaaaacaacaccggcagaattgccgcgaaacggttgactggtaaaagcatcgacgtggtacacctgcggtttcattaacgttctcctgtgactggagaactatcatagcctgcaagtggccggagagcgaagggctatccggccagggtgaaattatcgccggctacgcacaatttgatatcgacgagtaaagtactcaaacggcgcgctccacacatgcaccagtcgggtgaacgggaagagcaggaagatggtcattcccaacaccagatgcaggcggaagacgaacgctacgccgttgagcatctcactgcttccaccacggaaagtgacaatgctttgcgcccaacccaccagcttcatcatttcgctaccatcaggatactgtgcactaaacggtatggtacttagccccaacagacactggatcagcaaaatgctcatgatgatgatatccggcgtagtggaagtggcacgcacgcgctgatttgtcagcctgcgccacagcagtcctgcgccgccaatcaacgtcaacacaccgcaaataccgccgagcaccatcgccatgagttgtttcgctgccactggcaaaaaccacgcgtacatccagtgcggcgttaacatgccgaacaagtgcccgaagaaaatccccaaaatgccgatatggaacagattgctccatatcaccatcccgcgtttatcgagcatttgactactggaggcgcgccaggtgtactgcccgtagtcgtagcgcagccagctgccgaggaaaaacaccgtcgcacaaatgtacgggtagatatcgtaaaaaaagacgttcagatactgaatcatttcccacctcccgcactgatgtcgacatattgcggcgcgacatcctggctaaagcgtcgctgatattgattaagcgggctgctgtcacacgccgtggcgttatcttcaataaacttcacctgttcctcttcccacactgcatcaagcgcctggcgggtgtcatcgcgctcttcgctgtttacttgttttgtgacactgtcactactaagggagcttcccgccagttgcagcagagcatcaaacaacgcgtaccacggtgcctcgcgttgttttaagcgaccgccaagcagggcgaggatcggcgcaacattgagcaatccttctttcgcctgatcgtcaggcagtacgcttaaatactccagatacagcggtagataatcgggcagttcccgacaatccagctgcaggccgaccttttcatactccgccagcaggtccaccattgcctggccgcgatcgcgggactcggcatgaacatgttcgaacagcagcaggctcgtggtgcgcccgcggtcaaacacttcgcaccattcggcctgtttatccagcagcggcgcgttaagcaggttgtgggtgaaatccgtaagcatcggcgcgtcgcggcggatcaacgccagcgcgtcctccttgcattcccacaacagctcgtccggatactccatcaacaggccgatcactttgaggatctgcattattcgccctccgctttgtcgcgcacttcggtgatgttgatggcatcgatacggctactgttgaacaggttgaatttactgtcgctaccgtggcaaccgtcgccaaaggtaaaaccgcagccgttgcgttctgcgaaggcatcgcccgccatttcccgatggctggtcgggataacaaaacgatcttcatagttggcaatggcgagatagcgatacatctcttcgacctgggcgacgctcaggcctacttcgtcgatggcacgagtatcagtaacgccttccacggtttgactacgcatatagtggcgcatcgccatcatccgtttcagcgcccgcagtaccggaccggtatcgccggcactcaacatattggcgagatattgcaccggaatacgcaggctttcgatggcgggcagcacgccttcgcttttcggcaaaccgcccgcatctgcgtaggactgaatcggactcagcggaggaacgtaccagaccatcggcagggtgcggtattcagggtgcaacggtagtgccagtttccagtccatcgccattttgtagactgggctacgctgggcagcgtcaatcacattttgtggaataccttgtttcagggcttcctcgatcacactgggatcgtgtggatcgaggaacacttcgcactggcgttcatagaggtcaacttcgcgctcggtgctcgccgcttcctcgatgcggtcggcgtcgtaaagcagcacgcccagataccggatgcgacccacgcaggtttcactgcacacggtcggttgaccggactcaattcgtgggtaacagaagatgcatttttcactcttgccgcttttccagttgaagtagatttttttgtacggacaaccgcttatgcacaaacgccagccacggcatttatcctgatcaatcagcacaatgccgtcttcttcgcgtttgtagatagcgccgcttgggcaggtcgccacgcagctgggattgaggcagtgttcgcacaggcgcggcaggtacatcatgaaggtgttttcaaactgcccgtacatctccttttgcatggcctcgaagttgcggtcgcgggcacgtttttcgaactcaccgcccagcagttcttcccagtttggcccccagatcactttgtccatccgtttgccgtcaatcagactacgcgggcgagcagtaggaatatgtttgccttccggtgcgctatgcaaatgttcgtagtcgaaggtgaaaggttcgtagtaatcatcaatctgcggcaccaccgggttggcgaagattttggttattacgcccatcttgttgcccagacgcgggcgtatcttgccattcacatcacgcacccagccgccttgccactcttcctgatcttcccagtttttcggataaccaatgcccggtttggtttcgacgttgttaaaccatgcgtactccatgccttcgcgcccggtccagacgtttttacaggtcacgctacaggtatggcagccgatacatttgtcgaggttaagcaccatgccgacttgactacggattttcattttttcgcctcctgtacctgatcgcgaccttcatcatccagccagttaacgttcttcatcttgcggatcatgatgaactcatcgcggttgcttccgacggtgccgtagtagttaaagccccaggccagctgcgcgtaaccgccaatcatatgcgttggtttcgggcaaacgcgggtaacgctgttatgaatgccgccgcgcatgccagttacttcgctaccaggaatattcataatgcgttcctgggcgtgatacatcatggtcatgcccggcggtacacgttggctgaccaccgcgcgggcagtcagcgcgccgttggcgttgaatacttccacccagtcgttatcgacaatggtcagttctcgggcatctgtttcgctgatccagacaatcggtccaccgcgagagagcgtcagcattagcaggttttcactgtaggtactgtgaatgccccatttctggtgcggcgtcaggaagttaagtgctttttccgggaagccgtttggcggtatctggcgcatctcactgacgctacgggtgtcgataggcgggcgataagccaccaggctttcaccaaaagcacgcatccacggatgatcctgatagagctgctggcgtccgctcagcgtgcgccacggaattaactcatgaacgttggtgtatcccgcgttataggagacgtgatcgctttccagaccggaccaggtggggctggagataattttacgcggctgcgcctgaatatcgcgaaagcgaatcttctcgtcctctttgtgcagcgccagatgggtatgttcgcgcccggtgatctcgcccagcgcctgccacgctttgactgcaacatgaccgttggtttccggtgccagtgccagaatcacttcactagcgtcaatggcggtgtcaatcagcggacgcccctgtgccgggccatcacgcttggtgtaattgagtttgccgaggaaatcgatttcatcctgggtattccagctaatccctttaccgccattgccaagtttgtccatcaatggcccgaggctggtaaagcgttcatacgtagcagggtagtcgcgctccaccgccacaatattcggcgcggttttgcctggaatcagatcgcattcgcctttgcgccagtcgagcacttcacacggctgactgagctctgccggagagtcatgcagtaggggttgtaataccacgtcggtttctttgccaagatgacccacgcacacttggctaaatgctttggcgatacctttgtagatttcccagtcgctgcgactttcccacgccggatcgaccgccgcagaaagcggatgaataaacggatgcatatcgctggtgttcatatcgtctttttcgtaccaggtggcggtgggcagaacgatatcggagaacaggcaggtactggacatgcggaagtcgagcgtcaccagcaggtcgagcttgccttcaatcgctgcagtttgccactcgacttcttccggtttgatcccgtcgctggcaccgagttcctcgccctgaatcccgctttcggtccccagcagatacttctgcatatactcgtggcctttgccggaggagccaagcaggttagagcgccagacaaacaaattacgcggatgattgctgctgctatctggttgttcgcaggccatacgtaaatcgccgcttttcagcgcctgggcggtaaattctgtgggggataatccggccttgtcggcttcagctttaatcccgagcgggttacgccccagctgcggcgcagaaggtagccagcccatacgttcggcgcgaacgttgaaatcaatcagatgaccgctgtacttactggcatcggcgagcggactaagtaactcctgagcagagactttttcatagcgccattggctggaatgattgtagaaaaagctggtgctgttcatttggcgcggtggtcggttccagtcgagcgcaaaggccagtggcaaccagccggtttgtgggcgcagtttttcctggccgacatagtgtgcccagccgccaccgctttgcccgacacaaccgcagaagatcagcatattgatcatcccgcggtagttcatgtccatgtgataccagtggttaacacctgcgccgaggataatcatgctgcgcccatgcgttttatgggcggtatcggcaaattcacgggcgatggtttcaatatactggcgcggcacgccggtaatttgctcaccccaggctggggtgtacggtttgatttcagcgtaatctttcgcactgttttcatcttccagcccgcgatcgaggccgtaattcgccagtaccaaatcataaacgctgaccaccggacaggtgttgccatcgactaacgtcaggtttttaacgggcaattggcgcaccagcaccggattgtgttttacgctgcgaaaatgcggattttcaatgccgccaaagtaggggaaggccacgcctgcaacagcgtcatgttgaccgagcagggttaagctcaattcggtttccgtaccggcggcaatggattccagattccatttgcctttttctccccagcggaaaccaatgctaccgttcggcactaccaattcacctgcggtattaactgctacggttttccactgcggattgttgctttcgcccagtccatccaccaggtcagatgcgcggatcatgcgcccgggaacgtagctaccatcgtcgcgaggctccagcattaccagcatcggcatgtcgctgtagcggcggcagtagttgataaagtagtcgctgggattatcgagatgaaactcttttaaaatcacatggcccattgccatcgccagggcgctatcagtgccttgtttcggtgccagccactggtcgcacaatttggccacttcagagtagtcaggggtaatggcgatggttttagtgcctttgtagcgtacttcggtaaagaagtgggcgtccggcgtacgtgtctgcggtacgttagacccccaggcgatgatgtagctggagttataccagtcggcagattccggtacgtcggtttgctcgccccaggtcatcgggctggcgggcggcaggtcgcaataccagtcgtagaaacttaaacaggtgccgccaagcaggctcagataacgcgttccggcggcgtaagaaaccatgctcatcgccgggatcgggctgaaaccggcaacgcgatccgggccgtaggttttgatggtccagacgttagcggcggcaatcagctggtttagttcctgccagttggagcggataaacccgccgcgcccacgcacttgtttgtagctcaggcacttttgcggatcgttcataatgcttgcccacgccagtaccggatcgctgtgttgcttgagggcttcgcgccacagttcaatcagtcgtttacgaatgagcgggtatttcaggcggttagcgctgtaaagataccaggagtaacttgcgccacgcgggcagccgcgaggttcatgattgggcaggtcagggcgagtgcgcgggtagtcggtctgttggatttcccaggtcaccagaccatttttaacgtagattttccagctacaggagcctgtacagttaacaccgtgggtggaacgcacgattttgtcgaactgccaacgctggcgatagctgtcctcccagtcgcggttgctatgcatcacctgtccgtgaccatcggcaaaggtttcgcccttttgtttgaagtagcgaaagcgatccaaaagtttactcatgacatgactcctgctccaggaatgaattgggatctgatgccttgtcggatgcgacacggttgtacatcaggcatcgatctcttatttttggctgaacttccgccgaccataaaccagccaggtcagcagcacacaaacgatgtagaagattaaaaacactttcatcgcgccgaccggagagccggtcatattgaggctcatgccaaacgcctgcggaataaaaaagccgcccactgcgccaatggcactgataaagcccagagccgccgccgtttcggtgacggcttcttcatgagcttgctcatcactaccgcctttcatctttacccgataaatggttatctggcgaaagatgacggcgatcatctggaaagtagaaccacttcccagacccgcagtcagaaacagccccataaatacggcgtaaaaggcgatgaaattaccggagcctgtgcccggtaaggtaaggaacagcagggcactgaaaatcgccataaaaataaagttgatcaacgtcacccgcacgccgccgaacttatcggaaatagcaccaccaacgctccgcgcgatggcaccgataaatgggccaaagaacgccaggcgcagaatattcacatccgggaactgggtttttgccagcatggcaaaacccgcagaaaaaccgataaagctaccgaaggtggcaaggtaaagcaggctcagcagccagagatgcaggcgttgtaagacagggagctggtcggcaatactggcgcgactactggcgatatcattcatcccactccatgcggcgatcgtggcaatcgccagtagcggtacccaaatccatgcggcattcgccaggctcatcacgctaccgtcggcctgcggtacgccattgacgccgagaaaggcaaatacaggtacaaaaatgaccagcggtgcaaccagctgcattacacttacacctaagtttcctaatccgccattaatcccaagagcgctcccttgtttggcttttggaaagaagaaactgatattgcccatgctgctagcaaagtttgcacctgcaaaaccgcatagcaaagcgataacgataaatatcccaaaaggagtattcggattttgcacggcaattccgagccagacgcaaggaataatcaggattgcagtactaaaaaccgtccatcggcgtccaccgaatataggcaccataaaggagtagggaacacgcaataatgcgccagaaacggagggtaatgcggttaataaaaagagttgatcggtagtaaaattaaaaccgattttattgagattaacggtaactgcgctaaatagcatccagacacagaaggcaagaagtagacaactgacacttatccagagatttcttcgagcaatatgttttcctttattttcccagaaggccggattttctggtttccagtcgcgcaaaagataacgactatttttctcattttgcagtgccatattgttcctcacatgcacacattggtaatgaaaaaaagacaaaacacgaggtaaggcgcaatagccagttattagaattaaggatgaattgggtgaagtgctgattgaaagaatagataagaaagcgtaaccgcgggggcagaatggggattaagtagccagatatgtgttactaaatgtaactaacaagctaaccttcaaacggggttaatctttgaacgtatgtcatgtttcaacccttcagatcgtgaatctaaagggttacatattaactatattatcaacaagaccagacacttatagaattagtgatgatttattcattaaaaaggccaactactggaggaaaagcttctgtccagaaggtctatcggttcctctcttattgcctgattgtaataatcgttattacagtaagtattgtttatttcatctaaggtcatgtttttaacttttatattcatctggtttacaacttcctctgtcttgtaagtgtgtatattatatggggtatatgcttttttaataggatagtgaaacaattcgttatccacatctattccgtcagagtgaacttcaaatgcaccagggctaagaattgccaggccagtattaagcttaagtgctggggaaaacaaattaaataacatgagctgcatagtagggcaattgttcttcccagaaacatttaaaaaatttaagttttgctctgttttattatggggaataaagttccaatatcggatgtattattagtatcaatgtgggttattttattattgtccagtcttaaacttttgatagatggaagataagtcaggaaatcaagatttatatatttcaactggttgttagcagcgtttaatgtctgaacattgcagaagttgctatagaatattttaatttcagaaagcaaattgttgttaataagtaacgtattcaagttgggaaataagtcattgtgtaaacttgttagtttattatgggatagatccagcagtaagagttcatttttattacctgcaacaatatcagttaattgattatggctgagattcaggtattgcagccattcgcaagattctaattgcacaaactctagttgattatgtgccgcactaaaataagtaacactactaagcctatctatatcaatatttctgagagcattattattcatagatatatgtgtaatacttacatttctgccttgaggaaaatttatactctcaagagcattactattcagacttagctttacgagtctatcgtagttggttgcatcaaaatgtgtgaattggttattatcaagattgatagatgtgaagttttgcagccctggtggttgagtggttaaattaagtccacttaaatcaatggtcacttcattagtgtcatcaattatatttcttactgcagtccagtactgcatttgtgcaagtggatcattgttgatgccgttaactaatacatgccaaagatgtttactacttattagttgatcaatgtcattggttggcagtaaattgttattgcttaagtttaaatattccagttttgtagtgtttttggcgtttaaatgtgcaatatggttgtcgtttaaagtgattgttttcatcctgggatgattgtgtaatataaggtcagtgatcatattgtgatgggcacttaactcaatcagagattcttgccgcggctgccgttggcttcatcgttatagcctttaaaatcatattcccagtgaccaaaaccaatcatttgatcattgatttgcgtttctcctttaaagccgagacgggcataagttttatcaccatcgtcacgcttatcatcagtaaaataacgtagagcggtaaccttgccataaaggtcgagtttattaccatccttgttatagacttcggcagcgtgtgctacgttcgcagctaacaaaccagttacaaccaccgcaactatttttaatttcatttaacagaatccttttaattatcgttaaacgtattttctaaacgaattttaaacggcgtcatttataaatgacatactgtttttaaaatagaatggtgattaaaaacaatgagaaaaatagatgaaataatattatttatcgatatgtgatcgaagtcgaaatgagatataaggtgaattactggtatttgaaatttatttttttaatattgtcggaatttatctgattaactaccgggccgtagacccggcagttattttaaccacgacgtgtcgccagccagcagagcagggaaccgccgcagaccatcagcgcgccttgccagaagctgaagctcagcggggcgctgagcagcacggctgcaagcgcactggaaagtacaggcgtaaaatagctacctaccgccataatggtgacattgccatgcaatataccgacattccatgcagcataagcaaatcctaaggtaaatgccgcagagatgagtttaatcatgacgggcgtgctaaatatcatttctggttgtggcgtaagaaaatagtaaacccacagacttgctcccgttagcaggacaaaaacggtaattccattaaatccgcgtgcgtatttattcgttactgtgcaataggctgcccagataaacgcaccaatgaacgccaggaaataactcaatgggctggtggtgatattattgatgatttcatcataatgtaacccattgtcaccgcctaacacccaacagacgccgacgagggctaataataatccaggtacaatcaaccagttggttttctgaccattaaacagaatggcaaagagaattgtcaggctgggccacagatagttcaccatacccacttcaatcgcctgatgatgggtcgccgcataccctaaggaaagcgccagacagatttcatagctgacgaataacagactcccggcgagtaaatagcctttcgggatttgccgaatacgcggaaatccaaccgtgaagattaacagcagcccgcttaaactatagatagcagctgcgccgccgaccgggccgagcccctcactgacaccgcgaatcaatcctaccatcgtgctccacaggacgatcgctatcagccctatgagcgttgctttttgtcgtgtcatgctcgctgttttgtctctcttgccgttaaaaattaagctgaattttatagcatttttttaactggcctgtcaggcagtggtgcgtttttctaccgctattgaggtaggtcaatttgcgaaggcggattattttgtggcaaacagatgttctttttgatttcgcgcaaaaagattcagaattttactgttagtttcctcgcgcagtaatacccctgaaaaaagaggaaagcaatggacgtcagtcgcagacaattttttaaaatctgcgcgggcggtatggctggaacaacagtagcggcattgggctttgccccgaagcaagcactggctcaggcgcgaaactacaaattattacgcgctaaagagatccgtaacacctgcacatactgttccgtaggttgcgggctattgatgtatagcctgggtgatggcgcaaaaaacgccagagaagcgatttatcacattgaaggtgacccggatcatccggtaagccgtggtgcgctgtgcccgaaaggggccggtttgctggattacgtcaacagtgaaaaccgtctgcgctacccggaatatcgtgcgccaggttctgacaaatggcagcgcattagctgggaagaagcattctcccgtattgcgaagctgatgaaagctgaccgtgacgctaactttattgaaaagaacgagcagggcgtaacggtaaaccgttggctttctaccggtatgctgtgtgcctccggtgccagcaacgaaaccgggatgctgacccagaaatttgcccgctccctcgggatgctggcggtagacaaccaggcgcgcgtctgacacggaccaacggtagcaagtcttgctccaacatttggtcgcggtgcgatgaccaaccactgggtggatatcaaaaacgctaacgtcgtgatggtgatgggcggtaacgctgctgaagcgcatcccgtcggtttccgctgggcgatggaagcgaaaaacaacaacgacgcaaccttgatcgttgtcgatccccgttttacgcgtaccgcttctgtggcggatatttacgcgcctattcgttccggtacggacattacgttcctgtctggcgttttgcgctacctgatcgaaaacaacaaaatcaacgccgaatacgttaagcattacaccaacgccagcctgctggtgcgtgatgattttgctttcgaagacggtctgttcagcggctacgacgctgaaaaacgtcaatacgataaaagctcctggaactatcagctcgatgaaaacggctatgcgaaacgcgatgaaacactgactcatccgcgctgtgtgtggaacctgctgaaagagcacgtttcccgctacacgccggacgtcgttgaaaacatctgcggtacgccaaaagccgacttcctgaaagtgtgtgaagtgctggcctccaccagcgcaccggatcgcacaaccaccttcctgtacgcgctgggctggacgcagcacactgtgggtgcgcagaacatccgtactatggcgatgatccagttgctgctcggtaacatgggtatggccggtggcggcgtgaacgcattgcgtggtcactccaacattcagggcttgactgacttaggcctgctctctaccagcctgccaggttatctgacgctgccgagtgaaaaacaggttgatttgcagagctatctggaagcgaacacgccgaaagcgacgctggctgatcaggtgaactactggagcaactatccgaagttcttcgttagcctgatgaaatctttctatggcgatgccgcgcagaaagagaacaactggggctatgactggctgccgaagtgggaccagacctacgacgtcatcaagtatttcaacatgatggatgaaggcaaagtcaccggttatttctgccagggctttaacccggttgcgtccttcccggacaaaaacaaagtggtgagctgcctgagcaagctgaagtacatggtggttatcgatccgctggtgactgaaacctctaccttctggcagaaccacggtgagagcaacgatgtcgatccggcgtctattcagactgaagtattccgtctgcctagcacctgctttgctgaagaagatggttctatcgctaactccggtcgctggttgcagtggcactggaaaggtcaggacgcgccgggcgaagcgcgtaacgacggtgaaattctggcgggtatctaccatcatctgcgcgagctgtaccagtccgaaggtggtaaaggcgtagaaccgctgatgaagatgagctggaactacaagcagccgcacgaaccgcaatctgacgaagtggctaaagagaacaacggctacgcgctggaagatctctatgacgctaatggcgtgcttattgcgaagaaaggtcagttgctgagtagctttgcgcatctgcgtgatgacggtacaaccgcatcttcttgctggatctacaccggtagctggacagagcagggcaaccagatggctaaccgcgataactccgacccgtccggtctggggaatacgctgggatgggcctgggcgtggccgctcaaccgtcgcgtgctgtacaaccgtgctagcgcggatatcaacggtaaaccgtgggatccgaaacggatgctgatccagtggaacggcagcaagtggacgggtaacgatattcctgacttcggcaatgccgcaccgggtacgccaaccgggccgtttatcatgcagccggaagggatgggacgcctgtttgccatcaacaaaatggcggaaggtccgttcccggaacactacgagccgattgaaacgccgctgggcactaacccgctgcatccgaacgtggtgtctaacccggttgttcgtctgtatgaacaagacgcgctgcggatgggtaaaaaagagcagttcccgtatgtgggtacgacctatcgtctgaccgagcacttccacacctggaccaagcacgcattgctcaacgcaattgctcagccggaacagtttgtggaaatcagcgaaacgctggcggcggcgaaaggcattaataatggcgatcgtgtcactgtctccagcaagcgtggctttatccgcgcggtggctgtggtaacgcgtcgtctgaaaccgctgaatgtaaatggtcagcaggttgaaacggtgggtattccaatccactggggctttgagggtgtcgcgcgtaaaggttatatcgctaacactctgacgccgaatgtcggtgatgcaaacagccaaacgccggaatataaagcgttcttagtcaacatcgagaaggcgtaagggggcgaacagatggctatggaaacgcaggacattatcaaaaggtccgcaactaactccatcacgccgccttctcaggtgcgtgattacaaagcagaagtcgcaaaacttatcgacgtttccacctgtatcggctgtaaagcctgtcaggtggcgtgtagcgagtggaacgacatccgtgatgaagtggggcactgcgtcggggtttacgataaccccgccgatctgagcgccaagtcctggacggtgatgcgctttagcgaaaccgaacagaacggcaagctggagtggctgatccgtaaagacggctgtatgcactgtgaagatcccggctgcctgaaggcgtgcccgtctgctggtgcaatcattcagtacgctaacgggattgtcgatttccagagcgaaaactgcatcggctgtggttactgcattgccgggtgtccgtttaatattccgcgcctcaacaaagaggataaccgggtatataaatgcacgctctgcgtcgatcgcgtcagcgtcggccaggaaccggcttgtgtgaaaacctgtccgaccggggctatccacttcggcaccaagaaggagatgctggagctggcggaacagcgcgtggcgaaactgaaagcgcgtggttacgaacatgctggcgtctacaacccggaaggggtcggtggtacgcacgttatgtacgtgctgcatcacgccgatcagccggagctgtatcacggtctgccgaaagatccgaagatcgacaccagcgtaagcctgtggaaaggcgcgttgaaaccgctggcagcggctggctttattgccacttttgccgggttgattttccactacatcggtattggcccgaataaggaagtggacgatgacgaggaggatcatcatgagtaagagcaaaatgattgtgcgcaccaaatttattgatcgcgcctgtcactggaccgtggtgatttgcttcttcctggtggcgctgtccgggattagcttcttcttcccgacgctgcaatggctgacgcaaaccttcggtacgccgcagatgggacgcattttgcacccgttcttcggcattgcgattttcgtcgcactgatgtttatgtttgtgcgttttgtgcatcacaacatcccggataagaaagatattccgtggctgttgaacattgtcgaagtattgaaaggcaatgagcataaagtggcggatgtcggtaagtacaacgccgggcaaaagatgatgttctggagcatcatgagcatgattttcgtgctgctggtgaccggggtgattatctggcgtccgtactttgcgcagtacttcccgatgcaggttgttcgctacagcctgctgatccacgcggctgcgggtatcatcctgatccacgccatcctgatccatatgtatatggcattttgggtgaaaggaagcattaaagggatgatcgaagggaaggtaagtcgtcgctgggcgaagaaacaccatccgcgctggtatcgtgaaatcgagaaggcagaagcgaaaaaagagagtgaagaagggatataatctcttttgaactttaagctgaaaatggcgctgtaaaaggcgccattttcatattgtagacaacgtaggctttgttcatgccggatgcggcgtgaacgccttatccggcatgaaaacccttcaaatccaatagattgcagtgaacgtgtaggcctgataagcgtagcgcatcaggcaatgttgcgtttgtcatcagtttcaaatggcgctgtaaaaggcgtcattttcatattgtagacaacgtaggctttgttcatgccggatgcggcgtgaacgccttatccggcatgaaaacccttcaaatccaatagattgcagtgaacgtgtaggcctgataagcgtagcgcatcaggcaatgttgcgtttgtcatcagttctaaatggcgctttataaagtgccatttttttattgcgtaaccagacggcgtaatcggctcacatccactgttttttctgcctctgccagactccaggcgttttgcagattcagccacatttgcgggctactgccgatcaccacggaaagtttaatcgccatttctggcgtcaaagctgcttttcctgtcagcaatcggcttgccgtactgggagcaatttccattgctctggcaaactcgcgcaggctgacattaagttcgtccagactttcctgaataatgtcccccgggcggggatgattggccattttcattagtgtctttactctcagtagcgttccttcactgggaacactatcattattgttccttcctacgcaacaataatccatttagccatttcatgttggagagtgtgcgatgctgcgacccgaacatggcagtcgcagcaaaggcctcttagtgacggaaatcaatcaccatgcggccacggattttgccttcttccatctcagtaaagatggtgttgatgtccgctaacggacgcagggcgactttcggcaccactttaccttcggcggcaaactggaaggcttcagttaaatcctggcgcgtgccgaccaggctaccgaccacttcaataccatccagcacaagacgtgggatatccaggctcatagactccggcggtagaccgacagccacaacacgaccgcctgcacggacagcatcaactgcgctgttaaacgcagctttagctaccgctgttaccaccgcagcgtgagcgccaccagttttctcctgcacaattttggcggcgtcttcggtgtgactgttaatcgctaaatctgcgcccatttcggttgccagttttaactgctcatcattgacatcaatggcgatcactttggcgttaaagacattcttcgcgtattgcagggcgaggttacccagaccgccaagaccgtagatagcaatccactgccctggacgaattttactcagcttaacggctttgtaggtggtgactcccgcacaggtaatgctgctggccgccgcgctgtccagaccatctggcacttttaccgcgtaatcggcgaccacgatgcactcttccgccatcccgccatcaacgctgtatccggcatttttaacactacggcagagcgtttcgttaccactgttacagtattcgcaatgaccgcatccttcgtagaaccacgccacgctggcacgatcgcctggttttaaactggtgacacctggacccacttctgccaccacaccgatgccttcatggcccagaattacgccggttttgtcaccaaaatcgccattcttaacatgaagatcggtatgacatacaccacaacactccattttcagcagggcttcgccatgtttcagactgcgcagtgttttatacgtaacgtcaacatgatgatccttcgtaacaactgcagccttcatagttcctccttttcggatgatgttctgcatagcaggtgaggcaaatgagatttattcgccactacccagtatggatgagatctgaaaaagggagagggaaatagcccggtagccttcactaccgggcgcaggcttagatggaggtacggcggtagtcgcggtattcggcttgccagaaattatcgtcaatggcctgttgcagggcttcggcagaggttttcaccgccacgccttgctgctgcgccattttgccaaccgcaaacgcaattgcgcgggagactttctgaatatctttcagttccggcagtaccataccttcgccgttcagcaccaatggactatactgcgccagcgtttcacttgcgctcatcagcatctcatcggtgatacgactcgcgccggaagcaataacacccaggccgatgcccgggaaaataaaggcgttgttacactgggcgatagggtagattttatctttccataccactggattaaacgggctgcccgtggcgaccagcgcgttaccttcggtccaggcgataatgtcctgcggtgtggcttccacgcgactcgtcgggttagacagcggcatcacgatcggacgcggacagtgtttatgcatctcacggatgatctcttccgtaaacagcccggtctgtccactgacgccaatcagaatatctggttttacattgcgcaccacatccagcagactcagcacatcgctgtcggtatcccagtcactgaggttttcgcgcttctgcaccagtttggtctggaaaggcagcaggttcggcatcttgtcagtcagcaagccaaagcgatcgaccataaagactttctgccgcgccgcttcctcgcttaatccttcgcgctgggtctgggagatgatcatttcggcaatgccgcatcccgcactacctgcgccaaggaagacgatttttttctcgcttaactgaccacctgccgcgcggcttgctgcgatcagtgtgccgactgttaccgccgcagtgccctgaatgtcatcgttaaaagaacaaatttcattgcgatagcggttaagtaacggcatcgcatttttttgagcaaagtcttcaaactgcaacagcacgtctggccagcgttgtttcacagcctggataaattcatcaacgaattcatagtattcgtcgtcagtgatacgcggattacgccagcccatatacagcggatcgttaagcagctgttggttgttcgttccgacatccagcaccaccggaagggtatacgccgggctgatgccgccacaggcggtatagaggctcagtttaccgatcggaatgcccatcccgccgatgccctggtcaccaagccccagaatgcgttcaccgtcagtcaccacaatcactttaatattatggttcggcacgttttgcagaatatcgtccatattgtgccggttctggtaagagataaacacgccgcgactacggcggtagatctcagaaaaacgctcacaggctgcgccgacggttggggtataaataacaggcatcatctcatcaagatgattgtttaccagacggtagaagagggtttcgttagtgtcctggatgttacgcaggtagatgtgtttgtcgatttcggttttgaatccctgatactggatccatgctcgttccgcttgttcttcgatggtttcgaccacttccggcagtaaccccagcaggttgaagttacggcgttcttccatgctgaaggcactgcctttattcaacaacggaaattccagcagtacagggccagcgtaagggatataaaggctacgctgtttttttgtttttggttccatgtcactcactcttttttgaatatccatccctggggggcttttatcgtctttgctttaccgccagggcgtcggcctcaagtataaagcagataaaaacaaaaacaccattgcgcaggcaatggtgtttaatcgtcattgaggactgatggttatgaattacttttcagcggggcgttttctgccggttgggttatttactacgctggatttgtcaccttcggtaactattttgcgctggttagaaattttatggtccagtccaagaatatgacgtgcctgacggttgcttttcattttaactcctcaatcctgtagctagttttaaggacaacatcgccgtagcgaagaaacacgtgctaaacccctaaattaggttgccgatcaagcatagcaccttaaagcgtagggtgctggccactgaccacataattgatcgtttgctggtagatatcactgaggatgtcgttatcagaagcttcaacccatttggtcagctccatgagaatgtcatcttcagtgacaacaccatgctgtgcccgaaggccttgctcaatggcattaaccagagcgggttctgctgtactattttctgcctgataataagtaaacatagtgattctccgtgtctgtgtatttatggtgtctgctacggatcgcagatttataaagcacattcagcatggcaaatatttgccgcttcgttgttaagattagtcctggttgatgatttttatattttaacaccatgatattcatagggattgtgattggtatgatccgattaatattgatacaatatcttttgggttatatattcccggtaatctattgtgggaatttaatttaagtgcagaagtaatattttcgccggattttattcggaatatcctgcttatcctcgtgctgtttctcacgtagtctataatttcctttttaagcccacaggagagcaacaatgacaatccataagaaaggtcaggcacactgggaaggcgatatcaaacgcgggaagggaacagtatccaccgagagtggcgtgctgaaccaacagccgtatggatttaacacgcgttttgaaggcgaaaaaggaaccaaccctgaagaactgattggcgcagcgcatgccgcatgtttcagtatggcgcttagtttaatgctgggggaagcgggattcacgccaacaagcattgataccaccgccgatgtgagcctggataaagtggatgccggttttgcgattacgaaaatcgcactgaagagtgaagttgcggtgccgggtattgatgcctctacctttgacggcataatccagaaagcaaaagcaggatgcccggtctctcaggtactgaaagcggaaattacgctggattaccagttgaaaagctaaagcattgccggatgacgcgtcaggcgcgtgaatgcctgatgcgttgttagcatctttacagcgcccgccagcaccggagctcacgtccgtcctcccttattgctaaactttgccggacttcacatccgtgggttgccagcgggcaacgttcgtagaaaaaacagccttgcggcaacgtgcggtttcccggcagatccgttttacgtaatgcccattcttcctccagcggtttatcaatggcggggagggaatccagcaataatcgggtgtatggatgtgcaggtgccgtcagcacctgctgcgcgtcgcccagttctacaatctgcccgagatacatcaccgccacccgatcgctcatatgacgtatcacgctgacattgtgactaatcagcacataggtcagcccgtgattttcctgtagcgttaccagtaaattgaggatctgcgcctgaacggagatatccagcgcagaggttggctcatcaagcacaatcacgtcaggctggctagagagtgctctggcaatggcgatacgttgccgctgcccgccggagaacgcatgaggcaggcggtcgagatactccggacgaatacccacctgcacagccaactcctctgccaacgctcgccgctgttgttcactactacgcttagctatccagagcggttctgtgatgatgcgccacaccggtaagcgcggattaaggctagagagcgggtcctgaaacaccatctgcataatgcgttgactgccagaacggatgtactgcccgtggctcggttgcagcatacccattaaaagctgtgcgagggtgcttttgccgcagccactctcgccgacgatccctaaggtttcaccacggcggatctgtaaatcaataccattaatggcatgaacatgttccgtagttttaccaagccagtttttacgggccgggaaattgatatggacgtcgcgtaacgttaataacgtgtcagacacttataacctcctgctgcggataccaacaggcacagcgctggttgttgtcaccacacgctgtcagcgccgggacgttttcacactgtgcacctgccgcatagcaacgatcgcgaaaagcgcagccgtcaggcaaatgggtgaggtttggtaccgtccctggaatggcgggtaatagctggcgtggtactccatgttctggtgcgcattgcagcaaaccaatggtatacggatgccggggatgatggataacgtctgccgtcacgccgctttcaattacgcttccggcatacatcacgtaaacgctatcgcacagttggctcaccacggccatatcatggctgatgaacagaaccgcagttccactggcgcgggctttatgtttaagcaaacgcagtacctgcaactgcaccgtgacgtccagcgccgtagtcggttcgtcggcaataatcaattgcggctcgcaggagaatgccagcgcaatcattacccgctggcgcataccaccactaagctcaaacggatagcggctcataacttccacggcatccgggatttgcatctcttccagcaggtcaatcgctttagctctggcttcccgacgacttattggttgatgatggcggatcacgtccatcatctgaagacctattcgacgtgtcggattgaggtcggtcatcggttcctgaaagatcatcgccactcgtgcgccgcgccactgacgaagctgtttttcccgcgcgttaagaacatcttctcccagcagggaaatctgcccccgatgtacgcaataactgcccgtcggtagcagacgcataatcagcattgcggtgacacttttaccactgccggattctcccaccagaccgacaatttcaccgcggttaatctgcaaggacacattgttgagcgcgtgaacatcaccgttaaaaccggggaaactcaaatgcagttgttgaatgtccagaacgggttgggtcatgactgctttcctcctgctttttagttcaactctgctttcctcctgctttcgggtcaagcagatcgcgaataccatcaccaaagagattaaacccgacggcggtaagcaaaatcgctgcccccggaaatgcgcaataccaccactgatcgagtacatagttgcgaccatttgctaccatcgcgccccattcagcactcggttgttgagcacccaggccaataaatcccaacgtggcggccattaaaatcgcgctaccgatatccaggcttgcctgcacgatcagcggcggtagggagttacgtaaaatatgccagttgatcagatgccaacgagacgcgccaaaggttttcgccgcctgaacataggtatactggcgtacaactaatgcttgcccccgcgccaggcgcacataaaagggaattcgcacaatagcaatagccagcatggcgttaaacaaactcggcccgagagcggcagccagtgccattgtcagtaccaagctaggaatgctcagcataatgtccatgatgcgcatgatgatggcgtctgcgcgtccaccaagcacaccggatagacatccgagtaggctaccaatcatacccgcaatggcaaccacgactaatccggcgagaatactttgctgactgccgaccagtacgcggctaaacagatcgcgtcccacttcatcggtgccaaaccagtgcgccgcagaaggcggcaaaaggcgggcggttaaatcaatggcgttgggatcatgcgtcgccagccacggactaaaaatcatcatcaatagcattaatacaatgatgactgcgctggtcacggtgagcggactgcctttcagcatccataccagttttgcaccgttaaatcgcgtttgtttttgtgggcgtacggcggacgtttcctcgcttagcatcattcaccacctccacgtccgatacgcggatcaatccacaaatagagcaaatccaccaccaggttgaccagcacataagcaaaactaaccacgacggcaaagcccatcactgccgggaagtcgagcgcctgtatacttgttactacccatgcacccattccgggccaggcaaaaacggtttcggtgagcactgcgccatacaacaaatcgcccagcgccaaacccaatacggtaatgcttgggatcaacgcattgggtagcgcataacataaaacgatataccagccgggcaagccgctggcccgggcggtacgaatgtagtcttcactcaattgttccagcatcgcactgcggatctggcgagcgacaattcccaggtgaacgaacgccagcgttaatgccggtaagatgagatgttgcaacgcattgaagaagacttcaccgttgccttcaagcagcgcatcgagcagataaaagccggtaacgtgcgttggtggatccagccagtcatcaagccttccgccgccgggaagaatttgcagatgaccataaaacagcacaatgacgcccagcccaagccagaacgcaggtgtggagattccggtaatggccattattcgcaccagatgatccagccagcgatttcgccagactgcagagagtatgcccagcgggatgccaatcaggagtgccagcagcagggcaccaaaagccagctccagcgtcgccgggaaaaatatacgcaactcttccagcaccggacgcccggtacgaatggatgttcccaggtcaccatgaaacaggtcgctgacgtagcggtaaaactgtacatacagtggctggtccagtcccagttgctggcgaatattttccacgatagcatcgctggcgcggtcacccgccagtaaccgcgccggatcaccagggatcagatggctgataataaacgtaatcacgcagacgcccgccaccacgagcaccagcccccagcagcgttggcgtaaaatactccagaaggtcacgttatttactcatggtattgatattgaagacctgttccagcatgggattgaacacaaagcctttcacctctttgttcatcgccagttggtagtttttctggaacaggtacacataagcagcgtcatcaatgacgattttctgtgcctgctggtagtcccgggtacgctgcgtctggtcggtggtcgcaagcgcattgcgcagtaacttatcgacctcactgttttcatagaagctgcggttacccggcagaccttttttgtcactctcaaaccagtaattcataaacatatacgggtcggcaaaatccggactccagttgccaatcgcaatgtcgtaatcacctttacccactctgtcgcgcatggtggcgttcgccagcttttccagcttcacaatgatgcccagcttgttgagactggattgtgtcgccagagcaataggctcccagttcggatcgttatcggagtagagaaacgtcaggctggtgggtttgctcgtcactttatcccattcggctttggctttcgtttcgtcatggttgtattgcattgccgtcgcatcgtagccccacatgccttccggaatcgggccgcgcatctgttttccgttaccactcagaatgccgttaaccatgccctgataatcggtagaccaggaaatggcccgacgcagatccgcctgattaagaggcgctttgctgttattcagatacagataggtaacgcgcagactcggatactctgccacattgactttattttcctgcttcagggcgttgagttgatccaccggcagcgcatcggcaatgtcaatgtcgccacgggagagctgcaggcgacgggaggcactttcaccaataatttttacgcttacccgtttgaagttcggtttattgcctgggtaatgcggatttggcaccagaactaattgctgacctttttgccagcttttcagcataaatggtccggaaccggcggtattttgcgcgaggaagccgcgagcatcatccgctgcatgttcctttaagaccgccggattgataatggatgcaccgtcattcgccagcgtgtagaggaacggtgcgaatggttggctaagggtaaacttcaccgtatgttcgtcgggagcatcaatctttaaatctttgggaaatgcttctgctggcccctggccgatttttagtagccgctcaaaagaaagttttactgcttcggcagtgacaggtgtgccatcggcaaatttagcattatctttcagggtgaacgtccactctttttgatcgtcagacgctttccagctacttgccagatcgccttcaacgtcggtactgcctttatcaccgtccgttttgtactgaaccagccgctgataagacgggtaggtcactgtccagtcgttattatctattgttaccgccgggtcgagggtttgtggatcggcggccttaccaatcaccagcatatcttttggtacggcggcgtgcgcaaccgggaaatttgtggcaaggacgagcgcgagcaatgtgggacgaaagcttatgcttctcttcatgacagtttcctgattaactgacgtgctgtgtgccaggggatataaaacaagagaattgatcagcgagcagagggtaactcgctgcctggggtaattcgaagtgccaccattcgctggagataccgacaaaaccgccaccagtcattatcgcattcagcaacagccgattgcgctgagcggcgggcgggacggaagggtgataggcatgggagcgctcgtgcatttcatcgaaccctgcgcccatatcgaggatgttcccgtgctcatcacgaagcgtcaggtcgatcgccgtgccacggctgtgattagaaccgaccgtcacatcaacaacatattgcgggtctgggcaggcttgccacaacatcgcctgtgcttgttgtgggcgatacgcatcgtaaatcaccagttgtaacccactcagctgggcgatgctgatacttttcgccagcgcggtaatcgcatccttgtgtaacagacaacgcgcttgctgataaatagctttacctgtgatgttatcagcgcaggcgtatttcaattcgatctccagatcagggaagattacggctaaatcaaccagttcggtggtatcgctcataaacggttcctgtataagacaaaaattgctgcgctttccgcttatgcagatctcatgccatgccgggataagcgccagaatgctggcttaaagttatattttttaacttttgatcaacatttgtgcagcgtagtgcagttttggtgcaagaggggaagttaaggaaggaatctcccggaatcgtagctgaaatcacagtatttaagtgacagtgtcacgttaaatgaaaacccgcgagtgcgggcgagaggaatttgtcagattttcagcggtaacacgctgctcatccagcctggaatttcttcggcgggtagggggcgggaaaagaaatatccctgaataacgcgacagtggatcttgcgtagcatctcaaattgctctttggtttcgacgccttccgccacgacggttaaattgaggctttgcccaatgctggtaatggcttcaagtaaggcaaggatgcgtttttcggtcagacaacgatcgacaaaacttttgtcaattttgatttccgttaccggaagactgactaagcgggataatccggaaaagcccgtaccaaaatcatctacgcttaagcccacgcccatatcacgcaggatctgaatgcgcttaaagatttcggtatcgtgttccatcatcatgctttccgtgatttctaccgtcagctggtggccgtcaataccccaggcgtgcattgcatcagacacctgattaggcagttgattactgcgaaagtgcagcgcgctcaagttcacggataacgccgggatatgaatattctggctacgccattctgctaactgacggcaagcttccgcgatgacccagcgcccaatattttcgatttcaccaatctcttctgcgagaggaataaaccgactagggggcacatgaccatgcaggggatcgtgccagcgagcaagggcttcgatgccgtacagttcacccgtttctgcgaagatttgcggctggtaaaccagtttcagttggttattgctaatcgcttctttcagcgctgcgcctaaaaccaaacgctcttttaccatttcgttcatcgccgggctgaagaactgccagccgttaccgccattcttgcgaatataatccattgcattgtgagcagtggagagcaagtaatcgcggtttttacccaggtcgtagctgatgccaatactcaaggtaagcgggaagggtttatcgtcaatcattatcggcttgctgaccacattccgtagctcatcggcgatttgggtaatgttactgacgtcgttttcgaggctcacgaggacaaactgcgtaccttcgatacgacagagatactgatccggtttgagtttttcacgaaagcgattgaccacttccagcaatgcctgatcggcccacgcatagccaaggctatcaatcacatcctgaatatggtcaacaccgatgagatacaccacgggagagacggctttgtcgaccaggtcatcgaggtaattgtgcaggttattgcgatttggcagaccggtcatcggatcaaattggatgagttgttcaatatgctgacggcttttttcctgttccagcgccagcgcggccatatgctggctgatatctgccacgcgttcgataaaggcgctggtttctgctccactgctggttttaatttgcaggatccccgcaggcgcgccatcacgctgacgaatggtcgcactccagctttgcgcattttgaatttctgcaccgtgggaagaactcgcccagtgtatcggcatcccgttgcgcagtgcgaacaggctaacatggctttcgttgagtacagattcgatgttacgacaaatgatttcccccatttcatgaaatggcgggctgctgcacatggcggcgagaatattgccttcaagctggcgaatctgccgttcttcggtgatatcgctgaaagtcattaccaggttctgcagatgcgcgagcacgtcataaaccgggctgatagaggctttaatccagattttttcaccggtgcgcgtcaacagcagaaattcgtcctgatcgcgggcggttttccatagcaactgttgtaaacgaatgcggttatcggcagggaattcaggaatgttcaggagtgtatcgggctgcataccgctggcttcgctaatgcagtaaccaaacatttcggtaaatgcgcgattgcactgcacaatatggcgttccggatcgaggacaatcaccggtcggtcgagatggtcaacggcaataatcaattgtcgggtctgttctttttgcgccatttctacgctggcatcccgtaccagcgccaggtaataaactttcccctcggcgctcactttgcttagcgcaaaacgggtccagattttactgccgtcttttttctccagctgcagctcccgactcatcccctcaacacgcgctttaccgccttcacggttgtgacgaatgtattcaggatgcgcaggacgcaaatcccgcggaatcagcatatcaatgttattgccaatgacttcttcacgtttgtatccccagagcttctctgcggcggggttgaaaaacatcacttcatcattttcgttaattaacaccgcacccatcatattttgctcaagggcggggaaaaaaatgccatcggcggcattatccgcatcggttagcttcatgattacctctgcatcctggcgcatttaaagactggctttccagagttcaacacggtttctacctcgtcttttggcgatatacagagcttcatcggctatttgaatgaggcgctcatagtcaggatgaccattaaacatggcggcaccgatggaaagactgagggcaatatcttcgccgtttgcggctttcagtttggttttctccacccgactgcgaatacgttctgcggtacgtaacgtttcgttttcagaagcttcagtcaaaacaatgataaattcatcgcccccgtagcggaaaacataatcactactgcggacgttgtcataaaaggcctgagagactttacgcagaatttcatcaccagtgttatggccccacgtatcgttgatctctttgaatttatcaacgtcaataatcagcacactcagcggtgtaccggtccggttggcatgggcaatttcgcgtttgaagatagtcggtaggaaacggcggttaagtaatttcgtcagtacatccataccgacttcgtggcggcttacttcttcaaacaattcacgcagcaaggtaataatttggcttacggtatttcttatctgtaataaaaatttcacccgcagacttctgttattcaaatttctggtgttacgcatggtttgattgaaaataccgtcgaaatcctgaatcagacgggagatatggcctacttcggcaataccactaaaataatgtcgacctttatggttaaaccacaggccaaaatcagcctggcttaaaggcaaactactgcctaaatcagaatccagcaggattttatagataatatctatttcccaactaagtatactggctatttgccgttctttttcttcttcggcgttttccagtaagctgaagatacgatagttttcatcttccttactggcactactgtcactaaaggtaaacgcgcgagtcatcacttccatcgcgatatcaatactgttaatgctgaaatggtagacctgaagtttttctgcggcggaataatcgctagagaagatcaccggatagaggatttttttcagcacccgaaaccccatctcgacaatttctaccggaattcctatgcgggcatgcacttccgcgacggtatgctggatttgtattagcctttcgacatcgtcaacctgggcagaaagcacgttaataatccagcgttccatcgcactcttcaactgccgctcaacttgttcattactcaagaattcttcggcatgcgggtcgatgcggacaattcgataaaactcgatactcagataatgagcatgcgcaacggcaatttccgcggctttagcacgaatgggcggatctgcctgttcgacaagtccggtccactcatctttcattcttttaaaatacatctccataattcacacccttataaggctgggaaatcagacggaatcaaaatgaaacgcaacgtgcgagatcgactaactgcaccatattctcctgaaatatgaagatatactgaaaagaaataagcgatttaggacagtttcaatctacgctactgttcttcagaagagtatagcccatcgtaattatttttcggtgacagcgaatatcgtatggtttttcatattcatacatttttattagggatttatggctgtttaactaagtgtggttaatttgacttaagtaagcatgattattagtgggatagtttaagagggtaacaagccggtgggtaaagcaccggcttgttacaaagtaagaatgggagtttaactgccccagcgactttgcagatagctgaccgcttgttgagtctgcggtttattcagatagtcctcacggaacaagatggtgccgctaatttcgggcacagcatcgttaagatcgagctgctttttcagttccggtacgccgccgttaatcatccagtctggctctatcttactaggttcacccactttatagaaggcgataccgatatacaggcgggtcctggtcggtttaacgacatccgcccaccattttgccaacacgtcataacgcgcggcactccgactgaacggccagtaaatttggggagcaatgtaatccagcaatccttgttccacccatcgacgggtgtcagcgtaggattcgtcataggctgccgcgcctcgggtatcggaaccgagcggatcgtgacttcggttacgccacacgcctgccgggctaacaccaaattcgactcccggcttaatgcttttaatggtgtggcttacctttgcaattaactgctgagtattgttgcgccgccagtctgctttactcgcaaatgcgcctccgtatttacggtacgtttcgttatcatttagccgactacccggactctccgtatagaaatagtcgtcaaactgcacgccatctacgggatagcgggaaaccacttctgcgactatacttgtgatccagtcctgaacctcagggatgcccgggtcgaggacaaagcgatcgccagacgttctgatccagtcgcggtgttgcacatagacgctcgccggttgttgagacagagtgctattcagttccctgatagtaccgggcttcgtattaacgcttacgcgataggggttaaaccaggcgtgtactttcatcccacgcttgtgggcttcgtcgagcataaattgcagcggatcgtaacccggattttcaccaatcttaccggtcataagatcggaccacggcaaaattttgcttggccacagggcggtaccgtccggcttgacctggaaaaagaccgtgtttatgccgagacgttgcagatgatccagtttgtcgatcatcgcctgttgttgtacacgggcccggctggtggggttactaatgttaacgctggaaaccggtggccagtcgagccgagaaaccgtggccagccagatgccacgcatcggttgactgctttgttgcgtcgtggctggtggcttactacctgctggtggtgtcaccatggactctggaggcgtgcttttacaactacacagtaaaagtgccagtgcaactagtatcgctggtcttctaatcgttaatttcttgtttcgggagcagatatccatatgtgctggtttccggtaaacagatgtgcgctcattctcgtacttatccccgttaagtcaatacgacagcaagcacgaaaaagggagcgatgaattatcgctcccttgtcttataaccattcagacatggttagtgtttcttgtcattcatcacaatatagtgtggactacgtgcacgcgggtgcaggaagaagtgaccttttggtgcgttctgactgttgattggctccagagtgacgccggtatttgctttgcctttacgatcatgaacagcatagagaataaagggcagggcaagtaccaccaggaaactaacaaccagtaattcaacatacatatcggtagaatcaccctggatgttatccggcggcaggaaggaaacaataaacgccataatactagtcagcagaccgacaattgccacgaccagtttcacccctttaccaccagggatattaaatgtgcgttttaagtcaggatgtttaagaaccaacacaatgtagccaataaacagcatgaaataagcacacagataaatcaccaccgtcagcgccagtgcgatcaggaaggacatgttgttaccgccaccggtattggtgaggatgatcaacgcgatagacgtaatcaccagctggctaatgaccagcgttaccggtacgccatttttgttcattttagcgaatgccgctggcagcaggtttttctgcgctgttacatacatcccgcgagaaggaccaacaatccaggaggcgatttccgccagaacacccagcaacagcagtgcggagatcacgcgaaccgtccactcaatttctggtgccacatgggacatcagaacggtaaaggtttgcattacccctgcggagaggttgatttcattacccggaatgaccatcgcaatagacaaaccaccaacagagcttaagcagattgccgccaccatcagcagtaacatagccaacggatagtcgcgccctgggttgctcatttcattgacgtgggttgcggatgcttctacgcccatataactcaaaatgaaggcaacaaatactaccagggtgcccactttagagaagtcagggaagaaggtcttgctatccatttcgatagcaacgggggcaccggagtgcagataaatagccgctaatgcgatcaaaataaatgcaggtaacaggataccggcgaagaagccaactttagcaattcgcgccgtgtatttcgtgccaccaaactgcgttaatgccagcgcccaaagaatgatgagtgctgcaatagttttggtaatggggtcttcattcagcgctggccatttcaggatgtaggagagtgcccctaacacgaaatagagcatcggaataaaaccaatggcgatttgcagatagccaaaactgatcgctgcaaatccccatctcggccccagagtattacttacccaggcgaagacaccaccttcttcccagccgtcgacggtggccatttccgcagcacaaagtcccacgggaataaaccataaaatcccgcctaatagcaggaagaagactaaactaaagccgcttgttgcgaaggtagggtattcataaacagccattaccatgcttgccgttatggcaaagaatccaagtaatgtgagctgcttagctttacctgtctgtacacttgtagccatattatccccctaaaacggtattcctgtcggaaccgcacctgttttgttctgaagcgtattcagaacaatattttccgttgctaatgccagtgaacagactttggaaattgtcccgaaacgggttcgtttcgggacaccgttaccgttaaacgttatcaggtatgtttaaagctgttctgttgggcaataccctgcagtttcgggtgatcgctgagatatttcagggaggctttgtagtcttccagcaacagttcagcaaagtccatttcgaagccgcgacgacacataatgcgcatcaccacgatgtcggtggcttcaccgccgagagtgaaggccggaacctgccagccgcgcagacgcagacgttcagagaggtcatacagggtgtatcccggatcttcaccatctttcagtttgaagcaaaccgccgggatgccttcgtccgggcgacccgtacagatgaactcatacggccccagtttggcgatttcatccgccagataagcggcaacctggtaagaggcgttctgtactttggtatagccttcacgaccgaggcgcaggaattcatagtactgtgcaattacctgacccgccgggcgggagaagttgatggcaaaagtaccaatttgaccacccaggtagtcaacgttgaacaccagttcctgcggcagcgcttcttcgtcacgccagataacccagccgcagcccagcggagccagaccgaatttatggccactagcactgatgcttttcacacgcggcaggcggaagtcccagacgatatccggggcgacgaacggtgccaggaagccaccgctggcagcgtcgatgtgcatgtcgatgtcgataccggtatcggcctggaatttatccagcgcatcgtgcagcggttgtgggaactcatagttaccagtgtaggtcacgccgaaagtcggcaccacgccgatggtgttttcgtcacaggcttcaatcatgcgtttcgggtccataaacaactgaccggggcgcatagggatctcacgcagctccacatcccagtagcgggcgaatttatgccagcagatttgtaccggaccgcacaccaggtttggtttatccgttggtttgcctgcagcttccatacgcttgcgccaacgccatttcatcgccatcccgccgagcatacaggcctcggaagaaccaatggtgttggtgccaacggcctgaccatttttcggcgcaggcgcatgccacagatcggcaaccatatttacgcaacgcaggtcgatggctgcggattgcggatattcttctttgtcgatccagtttttgttaatggataaatccatcaatttgtggacattttcgtcgtcccaggtctggcagaaagtggccaggttctgacgagcgttgccatcaagatataattcgtcattgataatctggaatgcgacatcgtcgcgcatttcgtgcagcggaaaacgtttactttctgcgatagtggaaatagacttcgcaccaaaacgactatcgagtagttcgctccttaaatccgttacttgcttcttatccattttaaactccttaaaatgattggatcgcattaaaaaagtaggatttatcgataaagtaagcaagtgcaaaggactcgtgtttaaataacaaaatcctaatgttatttatcgtgagatattacgcgaataatattttttcattgaaaaacaatacaatatgaaattcttgggtggtggtaaggtgttttatgctgttatttttatgcgcattctgtgtctcctgaattatcacgtaaaaatcagaccttaaaatatcactattagtacttgattattattttgaacgcatttataaaattattacataaaaatagcgaatattgctaaaatccccgccaacgatgtgttgacggggctgttattattttggcaataatactccggtataagtatttaccggatgagaaagatattgtttaacggcagtgttaacattctctaccgtcatttgtttcaacaattgctcctgctcagtccatgctgcaggatcgtcatattgaataagactatttacaatagtgttcgctaattgttgaacgctacgctgttggatatcgaggctgcgctgaacgttttgctggtattcattcagttcttgctcactgatccctttagccagacgcttaaccatcacttcattcgctaacgttaacagttcatcatgtcgttctggttgacaagtaaaagccagcaaatgactgatatctttggcctgaggatcaacgctgaggcgagaagaaacgctgtatgctccagatgcctgttcacgaatattaacacgtagatcttttgccagtgcgacgttaaaagcatcgagcgccatacgcgtcggcagattaacaggtgtccgggaatcataacgcttccactgactaacctgtgccacaggttcattttgttcttttacagtaacgcttgcgttgtccgtcgcgcgagttaatggtttacctgcggctaatgggctatcagagtgtttgatacttcctaagtaacgcgtaattaacgccacgagtttgtcttctgcgacattaccgacaatgacaaacgtgatatccgctggagaactaaacaattggcgatcggcagccagcgcatctgcggcagtaaactgtgcaatctgattttcttgcagtaatttcgtgcggtcatcagcatagcgcgtctcatacatctgctgggcgaatttctccgctggacgctggtcgagcgttttcaacgcctgaatttgagcattttgtaggcttgcccaaatattatcgttaatcgtgctgtgggtgattcgctggttaatcaactgaaaaccaggttcagggttattagtccgcgcgctaacggagagcaacgtattcatgccactgactttactgctcatggttacgctattttccgcactccagcgtttcaggctggaagaggagagttcgccaacgccgcttccgctaactgctttatttgccagcgcgataagacttttttgctgcgcagggaaacttaaatcgcctttattgcttacggcaataatttgtagcttttgctcttcacccgcggattttgccagaataaccctggcaccattggaaagtgttaaacttgtcagattctccgccagcgtttctttgctgctaatttccgcctgtgggtctgcgtctactgttaagcttaaatttctgcctgggaagacgtaagccgccagctttttgttggcgtactccttttccagcgccaggatagccgcaggagacaatgcttttttggcggcaacctcattgtttaccatttgctcccaaaatgcgtcctggttctttcttaactgctgccatttttccgccagactttgcacggtaatttgctgccacagacgtttgctaagttgatatgtctcttccgggctcaagaacggcgtattatttaaactgctggatgccaggcgactggtcagcatacgtaaatcacgttcagcttgctgatcaaccgcatttttcagccaggtgaggcgggtagatttgacatcatcgagttcttcagcagaaaaaccatgctgatcaatggttgccaactctgccattaatgcattcgcagcatcctgcatattatcgtctcgtgcatttacacggaaaaacaggctctgataatcgggtgcaattttaacgctgcgcgcagtgccgccagaaatagtcttcaactcgccgctctgtatgcgttcctgcagacgttgattgaacagctgaactaacatgctccattcagcttgttcgataaagctttgctcatcgttcacttgtaccattggcaggcgataatagagtgcgatgccgttcacccggttttctttatcattaatgatattaaagcgcaggtggttttcggcttttgtcggccagacgcgattttcagctgctttgttagccggaagcttacttaaattatcctttatcagcgccagcgcttctttactgtcgatatcgccgaccacgataaaggtcatattatttggttgataccagcgttgataaaattggcgcaattgtgccggtgtgaccgtggcgacagtatccatcaggccgataggttcacggtctaaattacgggtatttgccagcaggaaagggcggcgcgcctgagaggtgcgccatttcgcatcctgatgggcacgccattcctcagtaattacgccacgttcagcgtctacttcgagtttttcaaaggttgcggcattactccattcactgaagattgccatcacttgttgcagattttgtttctgcgtagtcggcaaactcacctgatacaccgtttcgtcatagctggtataggcattaacatcgcgaccaaaacgcaggcccatactctcaaatgtttcgatgactttattacccggccatgtttttgtgccgttaaacatcatatgttctacaaaatgagccacgccgagctcattgtcttcttcctgcaaactaccggtatgaatttgcagccataaatttacctgatcctttggatgagcatgcggataaatcatatatcgcaagccattgtccagttgcccggtaattaacttttcatcctgcggtaaggcggcggcaatcagccgcccggggagcaacagagttgccactaacgtcagtaagaaacagaggtttctcataattatctccatgcgaaaaccgggcgaatttacccggttaagtaaaatccgaactattaaaatttcatgctgacatcaagccagaaagtacggccactggcgtaggtcgccacaccggtgttcgttgtatcaacagcggttttgctatccagtacattgagaatatcggcactgatcgtcaggttttgttgttgcagaaattgtggcgtccaggacaagcgggtgtcccaggtcaggctgctatccagtttttcgtcaacatactgcttgtaatcactatattcgctgatgtattgcgcatttgtcttaccaaggataatgcgagctttacgcgcttcttgccaggccagcgtattcgcccacactaacccgctcggttgatgcgtgaaatccatgtttaaggagatctttaatgggttattaaaatctgccactggaacgctatcgtaagagaccagattaccgttataaaccacctggttatcaccggtattgctctcctcataaccattgtttaagctcaagttgcccttgctcttgatatagctaaagacaatttgtgggttaatatctacctggcggatatgcaggggttcggccagttcaaaactgaggctgaagctatgcgttttggttttgccatcgttgttatattcagtaatggtggttttagtcgcgctgtcggtacgactgcttttgctgatttgatcatgcgcttcacggtaaacatagtttgcacgcgcaataacgttcttaccgattttctgctgcaatcccattgccagttcatcgttataaggcgttttcaaatcctgataacgcgtcagagttttattaccacttacgctttccgtccagctattgcggatatcacgtaatcccatatcaagaatattcccgccatagtaacggttataacctgctgtaatcatactggtttgattagcaaaaatatcccattccgtcataaagcgcggggagatattgtggttactcagatagttgtcatagtcataccgcacgccgggcattaaactcacattacgccagctaatgcgatccgccatatacagcgtgtagttgtcaattcccaggcggcctttacctttatggtaaatggtatggttagttttctttccggcagcattaatcacataggattcagactggttatggcgttcagtccacgcatcggaatagatgtattccgcgccgaagtagggttgatggctaacattacccacggcgaatttttgccagtccaggcgtgttttgaaggtgtaattatctacagcctgggaaatgtgtcctaatccgccacgggtgcaacgccctgtaatatcaccatatgtacaactaagttcggtgtaccagatgtcatgatcgtgacgggtataatcactaatatgatcccaaccaacggtggtacgcagtttggcccatgcgagctgcgtatccatatcccatgccagaccataggatttattacccatttcgcgatcagactgcgggaaggtgctggtattataatcacggctggagccggtatattttaaggttaaatcgtgggtaaagcggtcgctggcaaaccaggtaaatttgcttaatgcagtatcgataacgtttttatactgtgcccgaccggcgacaatgccgtcattgctaacataatccgcgcgggtgatatcagactggcggcggcttaaaccggcggtaacgccgaagttatcagcgagttcctgattaaagctcaaggtataaaagttctttttaaaatctggggagtaataagtacttccactagagccttgattaaatgcgctcttgttattctcatcgatatggcttgttaaccagtcgctacgcgtagtgcgataacccaatttcaccttgctatcatcagcgttgaagcgtttgatctttgcatcaattaccccgccattgaagcgaccaaattcaaccggcacaaaactgtcataaagcgtcacattgtccagtaagctgacatcaagataatacccctgactcatcccgctaatattggttgcactactggcatcggactcattcgctgggttcaggttattagttgcactaataccgtcaatcaaataggcattctggtaggggctcgcaccgtgaatagagattttctcagggcgaatatctccctggttcaagctggtactttgcgtactatccatgcgtaccgcagggttggttctcagcagatcgctgatattgccattcccggtcggtaaacgctcgatgctttcactggtgtaatgcgtgttgccgtttacgggtacagggacaggagcatagaccgtcatctcttcaaaaaaatgcatgtacatgtttttgtcatcgacggcctgcgccacatcagcgccacataaaatgacgccaggaataagaactcgcttcatttatttatatctccgtacagcagggcttttattgtttttataaaaccgcgctaatgtcacaaatatcatcggccaggttccagacaccgggttgatgtgtaaccataatgacgccgcttgtgggtagtttttcacgcactaaacgcagtaagcggatagcctcttgttcctcaagatgagaggtagtttcgtcaagaaatatccatttcggacgtcgtaaaattaatcgtgccagggcgatacgttgtttttcgccgctggaaagaatatctccccagcgatcgtggtcatgaatacgcgcagccaatttcccaagaccaacctgatgcagtacttcgctcaagcttttatcgtctacgggcaggggaagtgctttacaaataatctctttcagtaagccggttttgattaacggtgtttgactcacataccaactgtcagcaggagaagaaatatcacctttaaaccacggccagcagtgggataatgttttaagcagtgtggtttttcccgcgccagagtagcctttcagtaatagccatttgcctgggctaacatgaaagttcaggttctctaatatgatcttattatcaggcgtacgaatactcgcatcagccacttgtaccgcatgttggcaatttttaggcttattcgtagggcgctgttcagtgagttgatggaactcatacaagcgatcgataaccgcagccagttcagcaagttcgtcatatttataaataaaccagcttaaattgttgcttaccagcataaatgcctggcggcttttcatcagtccgcccagattgatctgcccgctaataaactgcggcaataacagaaagtagggaagaacgctaaggctgcggctataaatattctgccagtaatcaagccaccgctgacgattcattaaacgatgccagttctctttaatggtatgaaaattgtcgctcaactcctggcgttgtagagactcagcattgcttagcgcaatcagttctgcctgcttattatgctgcacaagatttgttcgaaatgtcgcttcgctacgttgtttttccacattaagcggacgaatacgtttacccaccttatgggtaaataaagttccaccgatcacaatgagcacgacggtatagaccatatacccctggatattccattctgttccaccaacagtgaaactgagcgtacccgcgctttcccaaagaataacggtaaaggtgatcagcatgctaagactctggatgaagccaaaactaagactgagcgttttgctgatcagtaagagaatgtcttcagcgatacgttggtcagggttatctgtatttttatgctcgccgtagatctgcgtgaagtagtagtttttatctgcaaaccaccgattaaggtagtaatctgttaaccattcgcgccagcgaatagtcagtagtttaattaaccatgttttgtttacggatattaatacaaagatccccagcagggcagggaaccaaaggacaagctgccaaagcttatcggtttctttctggcttagcgcattgaaaaaatcattattccagtcgtttaaccagacctgaattttaaccacgccaaggatcatggcgaggataataatgattaacaacacactagttttattattcttacgcagccaaaagggcttcaacagacagagatactttgctatcaacatacgaagcgtaatgggaatggttatcattagcgaaaattgattgtgccatccaatgattatctatggcaatgatttactgatgaaatttatttaagtatcatttaacaatatgaaatataaaggaatatttcattttcagtggttatggttatgctattgataatcaaggatattgctaatgccctgatgcataccacgtaagccaggattttcgcaagggaagatgatgatgacgaaacacccgacaggaatttatgtcgggtgccttgttaaggtcataagaaggaggctaagaatggagttaaaagagagcgttattaattattctccatttgttttgcaacatccataatgtggtaaagcggtactctgttcttagctaactctaccatggcgttcatataaggtaccatggtactaaaaaggattttataaccttcgcaaaaataagaaacagtctcattgtttactttagtaatacgatgcttaggacaaccgccattgcagataggtttatatgcacattgctgacatttcgctggaatccgttttttttgcgctgtcagttgtacactgttcatcgttttgagttcagatttattaatgtttccaattttgtactgtggatagacaaaatggtcgcattcgtaaatgtctccattactttcaacaaccagattatccttgcaggactcctggaaaatacaactggtatgcccattccccaaaaaacggctgacaaagctttcaaactgacggatgaaaatttcacccacatcgtttttaacccattgcataaaaatggtactcataaacttgccataagccgtgggaggcacagaaaaatcaatgatacggaatgtgttctcactatgaccactgaaatcaatattcggcgtcccggtttctagcaattcgataaattgcatatgtttactgccgatagattttaaaaaatgataaacctcaagagggtaatggacattaacgttattaatgacggttaacgtattaaactctacttgataacttttcagacgctcgatggctgctatcacttttgcaaaagtaccgttaccactattactgcgtctgtaacggtcatgtaactcctgggggccatcgatgctgataccaaccagaaattcatgttctttgagaaaggcacaccattcattattcaataaaatgccattcgtttgtaatgcattaaaaatacgtttttggcctgcatagcgttgttgatagtgaataactttacggaaaaaatccaggccagccagagtgggttcaccgccttgccaggtaaaatagacctgattgccagacgctgcgatatattgtttgatgaactctttcagagtgctgtcatccatccatttttcatgagtaaactggctctctttttcaaggtaaaaacagtaatcacatttgagattacattgaaaactggagggcttggctgtaacgtgcatcgctatctcgctcaataaggcggcggaaaaatccgccgcatgaaggtttagttatttcgcttcgcttagtgctttcttgatattgttaaacttctcctgatttacctcgctaagcggtggctggctgctgtcgataaactctcttaccacgccttgcatctctttaacgacctgcggattggcggcggcaaggttatctttttgctgtagatccgtcagtttgtagagacctaactgattgttttctactgtatagacaaggctataatcgttatttctcaccgtataagagaattggcttaagtcctcagtgttggggttatgcgggtaatcgtcactctgatggcgaacaaatttgtggtaattatcccagaatggaatattttcctcgtcaaaccagtgagaataagaggttatccaggtcagatttttatgtggctcgccttgtttcttatcttgcaaccagggcagcaaggaaacgccatccagcttaaggtcttttggaatgctgatatcggctgcatcaagagctgtcgggtagaaatccattgcggaaatcagcttgtcataattaccgggttgaagttttcctttccaccacataaacattggggtgtgagtaccgccaggataggtctgactcttatagcctttttgcgccccgttcagcggcagaggaccatcgataaccgcaccattatcggaggtaaagagaataattgtattgtcatactgtccgtttttcttcagttgttcgagaatgcgttttacaccctgatcaacagaataaacggaagcgtagtagttatctgctgtttgactaccggtattaaattgcttctgatattgatccggtgcaggattatcatttggcaggtgcggagcattataagccaggtaaagcataaaaggctggtcaagtgttttggcacgatcaacaacgccaattgcctcatcggttaactgatcgctgatataaccttttgcggggacacgttcacgatttttgaacagactaggggagttgtaatatgccgttcctgcagcgtggaatcccataaagtaatcaaagccacggttttgaggttgccattcttccgcagaaaatgtggtgaagttgtcatgatagtcacgcgtttgtttatcttccggtaccggcacattactgattttactcaagtgccatttacctactgctgcagtgtaataaccatgattctggaataattcaggcaagaaagtttctgttagcggaataccatcctgagcatcggtattggaatagacaccaaagcgggcgggagctcgaccggtcattattgcggcgcgggaggggccggaaacaccgtgtgccacatagccgttagtaaaacgtacgccttcatccattaaactaaggagcgtcggcgtacttttttgtgcagcttcaatggctttatctatccctattttgtaggtatcgacaacttcacgattttccattgtttttgggtcaaaagatcccttatcaaaaggaagttgtccataaccaagatcatccatggtcagtacgataatatttggctttcctttggtactgtattctgtcggcgtaaagtcactgaaagcaacgtttgttttggttgctttcagctttacatcatctgccgcatgagcagcaaatgcagccataccagatgccagtatcaaagatatgctggtacttacgacacttttctttaatgcagacttcataaatgttcctcttcttattgtacttaattccaaagtaattttacgaagagaaataagtggatgtaagtgaagttagtcacataaagagatagcagatttagctaaaaaaagggaaaaaacagtccataaagcgttgacattactttctgttctattaagtaatttctcgccgataaacaactaatttattgatatttaataaattattgcattttactgacaaaatgcagaattgagatcataaataatcatgcaacaggttatgcaagtgcataaatatgtgatggatgtcacttatttatttcaataaatatatcgcctaaaaacaacgcggggcagggaatggctgccccatttaattcttacgcagcgtgtgtggttgactactcgttagcaaataatcaaatagctaaagcattcatcgtgttgcccgtattcatacccgtgtgactttgacaacggtactccttagaaactctcttcggactgttgccgaaatgtttgcggaacgcataaataaaataagatgtactggcataaccacattgttcggcaattttattgacactaccttctacgcgtatcaaattttttgcgtgctgcattcttgcatctaaaagaatctgactgaatgtcgtttgctcttgcttaagttttttcttcaacaggctttcactgatgtacaggcagtcacaaatatctttcagcttccatgggtgcgccggcttcatgttgacaatatttctcactttcccagaaacggatagcacaccgttagttaatagtgtaatgaaacctttgcatgcggcaaaaatagacaggcaagaaaaaagcaaaagttcactaaaattatgatgattgcgttcttcgctgttgagataagcaatcatttcattaagcaatccagtcggtacattactagcacgtaaaaacttcgcaggaacaggcaccgtcactgtctggatgttagtgcattgtagatattttttaatggtattttcagtaaatccgatctctttaaaatgccgctcataaggttcaaaatgcgtacgaacagcgttatctaccatcaggatctcgccgtcagagaaggcgtaatctttatctaaaatgttagcgttgaaggcatgatgaataaatataacagaacaaacgaggctcattttatctccttaaaacaataaagtttttatcgatacttttttaacatttcatatttataatttgctgtttgttttcagccttgcaaactattgataatgaaatgtgtaagatctcttgcaatgcgacccatttctgaaatactcagctgatcaattgccgaaaaaatggctatcaacgtaagtgtcagtaataagacaaccacaattgcagacatgatttctttatagttgtctctttgcgtgattttgtttttcactgtggtcgcatgcatttcaaatatgtttatttagcggataacgttaaaaatcgttaatcagtatgcttaatataacaggctggagaaaagaggaaataggactggtgcttcagtactgagcggagtttcttacagctgtaggcagaagtttatatcttatagtatgtagtttaatttaatccatgtgagcaaattgcgaaataatagtcaatgaggaattcttctgctgtgcggatgacagcagaagaaatgagaagaggcattaattacttggttctaattcaaccggaatacttttatagccaggaatgccacttaatggatcgtggttatcaagtgttagcatgtgattgctttctggaaaataggtcaccagactgcggtcagccatagggtaaatgaccacttttaatctatccatgcggcgactgctgcgcttaccgtctggcgtaagcgcaataagattaactctttcgccgttttttacacggcaaattttagcttgtttagcactcataaagaccacatctcgttgaccgaatacccctcgatagcgatcatccataccataaatcgtcgtgttgtactgatcgtggctgcgtactgtcgccatgaccagcttactgttaaacgcactagagggatcttctaacagccctttgctggtaatgaaattagccttaccactcggcgtcatccagcgcctttcagcagctgcatttatcaggtgaaaaccaccgggatgacggatgcgctggttatagtcggcgaactctggcagcacagcttcaatgtcattgcgaatgcgatcataatcttccaccagatactcccaggctaccacgctctggggtagtgctgcctgcgcgattcccgcgaccactgcacactcacttttcagcattacaccggcgggttttaacacgccacggctggcatgaatcatgctcatactatcctcaacggttaccgcctgcgcaccgtttttttgcatgtcaatctcgctacgtcccaggaccggcagaatatagctatgccgtgcggtcaacagatgagagcggttaagcttagtggctacgtgtaccgccaaatctaattgcgttaacggtacagcgctcgcttcccgatctggcattgccagcgcaaaattgccccccatgcagatcaatgctcgagcctgccccgtacatattgcttgcatgctggcaattgcagcatgtccaggtgcatgaggtggggtgaagccatagcgctcacccagacgagccagaaactctgcagacggtttctcggtgataccgacggttcggtcgccctgtacattagagtgtccacgtagtgggcagatacccgcaccaggcttgccaatgttacctttcatcaacagcagattgaccagttgctgtacgttctgggtaccatgttcgtgctgagtgatccccattccgtaacagataatggtgcgttcggcagcggcatatgcgtcagccagttcggcgatttgtgtctgacttagtccagaaatacgttcgatatctttccactcggaattgagaacgtcacggcgtagctcgtcaaagccgacggtatgcgtttgaataaactcgtcatcaagcaaactaggccgacctgcggcgcttgcagcatcatcgcgctcaattaacaggcgcatcatccccttgagcaacgccatatcgccaccaatgcgcacgttatagtaggcactggccaactgagtctcagagttcgtcagcatttcaaacgggttttgcggtgcggtaaatcgctccaggccacgttcctgtagaggattgatggcgatcattttcgctccccgtttcactaaagcgcgcaagctagtcagcatgcgagggtggtttgtaccagggttatgcccaatgcaaatgactaaatcgcacttctcaaagtcttccagcaacacggtccctttacctacaccgatactcgctgccaaacccacgcttgtcggttcatggcacatgttggagcagtcgggaaagttattgctcccgtattcacgggcaaaaagctgataaagaaaggcagcttcattggaagtgcggccgctagtatagaattcaacctgattgggatcactatagctttgaaggcgtgcgccaatttcgtcgaaagcttgttgccagcttaatggcttgtaacagtcgctgacggcatcatatttcaaaggctgagtgagtcgccccgcagcctcaagctcgtggtctccccaggtaagtaaactttgaaccgtattctcagcaaagaaagaggcgtttacctgcttatccgtgacttcccaggcgattgcttttgcgccgttttcacaaatgtcgaaactcgcactgtgcttaggatctggccatgcacaacccggacagtcaaagccctctggcttattcatgtcaaacatggcaataacatcctggcgtatatccatctgcttacgtactgcattcgctacggatttaacagcaccccaaccacctgcagcaccctggtaggattcaatttttttcttcatctacttatcctgtgtggaaatgaattattaggatttgtaatagcgatgatgcacagtacatacaaagggattatcgccaacatggatatataagagtaggggactactctctttctatttttaatctattatcgttaaacaatagattaaatacgataagttaagcatcatctctcatagtgtttaaattaacatatttttcaatataaaaaataagactctggcttcaattgtgcgcggattttcttacaggtgtaggctaatagccttcacaaaataattatccgcgcaattttcgtgaatggagcgcatagactaaggtcaaaatcacaattattcatagataaaagtgacaccaatgacactctggacggttccggcactaaccttgtttcctgtttgtccataggttgcgcttaaacccagaggtactttgcttttatttactgtccccagggagacattttctcccgtagccagtatttttccattacgcattagagtgacacccactccgcttgcttttgttgcatcaggtgctgtgttagcaaacacttgtcggctactgtcagtggtggcaccgctaagataaaaactgagcttttgttcgctactgcaatatacgccaaggggtatttctgcgcttccaggaaagtccgggagatccacggtgacatttcgactatcaacggtgcagccgcctgttggcataacaacattgttattactaataatattccacgtaaaattacgcggatttccgcttcctaatgttgcaattttatacatatgaatacgggcaatgacttcccccgcttttatgacaactccaccggccgccccaactggggtaatatagagttttaacggtaatggcatcggtgtcttatcaccaatatccaatacgttggtatttgtcgtcaacgggaaggggtaggtcacattattccagtacaggcttcctttataactctgtagggagcctgcgaaagcactgccttgtaccaggtttatatgatcagtgtcgtaccagccgccgtaatcattccagcaacttatatgctgagacaagtctacaaccagattctggcccggctgtattacagggtcgagattaacataaacagaggttgtacctgctccaatactactcccgccatcgacattacaactgaaggcaaaaactttgcctgccattaatagaagataaataccgaacaggacctttatactgattgttttacccatgatatatcctaaggttaaaaattgatttaaaaagaaggctaagaaaatcgaatcgacgttattgccaggtgtagatcacattgattagcgcctcgatcgttccctggcttgcgtttccattcaccgtgatagctcttgccttaagtggaaactgtgcattacgagtgatctcatcaacaataaccgttttgctatcgccattttttaacgcagcatcctggtcatccctcagctctatctgaatattttcggcagtaccttcatttttgtaataacccgtattgtcagtactacctgtcacgattgccgtcactgcacttgtttcaaccggacaatcggttaaactcaaagtaatattgtgccagccagatgcagaaccaggttgttgcagattgcgcgtataaagatccccgagattaacgttagcttctttggtttgaatagtgcagggtttagcgactacccgaccattaacagtgatagtgacatcggcggcctggagagttgctgtgaataacgcgcaaaacgtagctaacaggaacctcttgtgaagtcttttcatatctgactctgattattgaaattcaagggtaaaggttgcgctagccctcaccagtcccggattgacggacttctgagtactcttcagacgagcggagtaaggcaaaatattgttctgttctggtaccagtgggatccactgcatcccggcatgaagatcattcagtttcaccggacgcatatttgcgtccaatatttctatacccaaaccggaggccgtattgcttccttcatccagtttcaacaaagtattattttctgcatcctcaataccgttaaatgcaacccgaacccccgttgtccctttgctgcattcacttaacgtaatctgaaaagggacggctggacttgtgctaccggtcgttggaaattgtctggcactgtttttttggagatctacggtaaaattaaggctatcgctactgactgtgcagccataatcgaggacgcgcccgctaattttaataacgctatctgcggataaagcagaataggtggttaaccccagacataaaccgaggaaaataatgttattgtatttcataatctattgttccttagcgacagattgctgtctgctggttcagtaaggtaccaggagaaacttcaggaagcttgtactcgacaatacagttactgtttttatctttgccccaactaacctgtaattgcccactctgtggaagtccagtcagataaacctgaccattttccgcgacaatgctgccatttttattctctccgtgtgtgacaattgcaccgaatggaacgctcttattaccgtacttcaacgtcattaatactttcccgccgatttgtgcattaaatgttgctctggcaatagcaccgtgagttgggatgacagtgaccacggtttcatccagttcaacattatctgcaagggaattcgcgttaagagcaacacggttttctctatattctgtcgcaaatggtaatatggcatagccacgccagtcggtatgaattccggtctggttctctattttgacattatcagcaccaggagccttaaccagaaccattgtgtcgcccagcggctgtccaaaggtgatgccatcagcatgagcaataatcccaccactcattccgtaataaatctggctgctgtcaccactccgactgtaaccgacattagtattaccataagctccacgataattaagagaactgtaaccactggtgccagagcttgtattacctccgtgggtgttaccgacctgaacgctataattcaggttattatccggcagcagagtgccataaaccccgcttagattggtcatgccgcctttcaaatcgttactcatactgtaactggcgttactattacgaaatgcgctctgactgtctgtacgcatccaatgactgaagggaacattaagcgtaaaagcgagtaaatgatcccgatcgttttgccatatattattggaatagctgtaattcaggctagtcgtaatatcaccaaacggcacatttaatccaaaacttatttgctggtcgctgcgactcgtgttccagtaactttggcgactggcactgaaaaatgtcgtaccgtaatttccaagctgctgagagatgcttatttgttcctgaccacgcttactgtagaacagattaaaataatcaataaattgtgtctgctcattggtgtctccggtaggaggcttgacggtgtaaccactcattcgactgtaggcactgtcggataagttataaaaaccttgcgtagaatagcgatatcctgcgacctggatattggttccacaacaagtttattgctgcacttgttgaagagagtatttgcaaaaacattttatgtcgctaaataacatgacgatttcattatgcatgttatttataaaccgtgactaaacagaatattattgcgaacaagggaagtgtcaggaaaggtcaagagctaccaatggttaatatggctataaatcattagctatggttaatgtttgcttgctgaaactaacaccgaattgctctaaacagataagtgcagggtttattaaagctgtccgacagactttcttaacctggtaatatctctcttgggtgactctccaaacatccgcgaatattcccgacactaatgggatagctttcgtaaccgacagcataggctgctgtggtgacatcgtaatgttcattcagcatctgtcgcctgacttcattgagacgtagccatttctgataccggagtggactcattcccgcttgatccgtccttaaataagtaacagcaccctctggtgttttcgtatgcagtgtctatgcgacagacactgcgctcttagcatggggcagggaataaccaggctatttctccatgcacaggccaattatgaaagaggagaggcttaagttcttgaaccctgaacgaataacgactaccagaaaagcacttcgcatcactcagacatgatttaacataatatacattatgcgcaccaatataaaccaaggaagaatccagtcgttggcggtcatgattgtcatgctcattaacaatgaccaaaccccatatctcacttactaccgtattctcggcttaaccgtccatgcaacctcaacacattgctttcaactgccgtcaccacgttctccggaaaatctgtcggtaaactagtcttcacgttatccagtgctgctggaatcattctggcaaagtcactcaggatttcatgcatctgcacttccgggaatctcagcacctttgctgtcgccaaaaaatgtcgcggataaattttatcgattgccgtttttttgcctttggatgcgttaagccccattgccagtttgagatcgctgatgtgtattcccgtaccgccaaggaccggaaatgcactaatgatgtcgtaaaatggcgtgagtcgataactgccgccagcctgaataaatacggagaagttttttgcatgaccgtccgttgcgccaatcaaccactggaagacctggaatttcataaaatcatagcgatctttcagcgcctcgctggaccccatcaaaaaagccatgatccgcgcgatgcctgggcctccatcactttcatatttcacgctactaggtaaaccgaatgtctgacacatatcctcctgtggcaagcgaagtaaaaccgttcgctcagcattccaacgcctgtcaaaacgttcgaccgctaacgcgcgcacatttcccgctttaatgatttctgcgtccggaacattcaacccaagttctttcgccagcagcagacagtaatactcattatcaacgctttggctgagatcgagcgtcgcattgggctgcctgatttcgccaatcggtaatttaatgatgtgcgtcgtcggcgttattcctttcggaatgcaccagtcattgcctattctgagcagtgctgtcttctcctgtgcgccagcaacgctgatgcgaaagtcattttcttctctaatcatgcctagcgggatatctgctttataagccgttaatacttcttcaagtctggcttcagtaagcttttcccatgccattatcggatgcgttacggtttcgtcttcgggtattaacgtcacggcaccaacgctgtctcgccctatttcactcaataaatcaaacggttgtctggatttggcatgataacgtttaacgatccggtcacgtacaatcgggctatcgggtaacaggttatcgaagaagttaaatacggcatcagaggtgatattccccctctgcaatggcaggctaagactcaacggtctggcataacggcttgctaaccactccggtgcatacttaaaggtgtgcgcgccgttggctaacttcgttaactcgcctacccgctggttgttcatccaagtgacaagtttaggcattaccactccagattttgctgttctgtactttctgggctggcatttttcgcgtcgcatagcgtcatactgagttcaaggctctgtaaaatcttaaaaaatgtcgtgagcgtggtattgtcagggttgttttcgaaattggaaatcgtcgcctgcttaataccaatttttttcgccagctcgctctgcgtccagccattttgctggcgaaccagtttcattgcattcgccaattgcgttgggctatagatcttctgaaagctcatcatgtcatacgtccacagcaagtttatccgcttaaggggatattataagttttatcctttagtgaggataagtcaatctggaaacacatcttatccgctctacgggataaacgctgcgatatccgcgatcgcggataaaaaggaggatttaaataaggcgttgatgcgccgtttgaagtcggcaatattaagccgcatgccatctcgacatgcggcttatacggtttaccagctatatttcactcccagcatgccctgagtatcgctatagcctttatcacctagttgcacaccgacattcccccacaggctaaggttgttatttactttcgcctcaaccccggtacgtacttcaccgagattacgcgcaccttcacggcctacggtttgaccattcatcttcacggcgtagactttgctattgttgatccagttcgcttcaatgtaaggctggaactcacgctgtttaccatcgtcacgctggtgatggctgttcaggtaggttttcaccccaagtcgcgtttgcacatttccgtcgccttccgtttcaatgcgcgttccgtctttccgggtatggtcggaatctttcacacccatccaggtgatttgcgcctgtggctggacgtaccaggtattcagcgtcccttcgctgccgctaaatgttcccgcttcaaaggtatacccaccctcaacagaggccgtcacaccgcgagaatcatagtcgtcagcagaacggttatcggaactgacgctgttatcaaaccagttatacagcgcccagctgtcaacataagcgccggtcttattcgcatcgttctgataccaggtcgcgtacagcccagcgctgtaaccgctgatgcgcccatcgcttttataacccacacgattactctgagtattactgtgctgattggcgtagcctgccatcacgccaagatgccagcgatcctgcgcgttgctactccactgcgccaaatcgccgcctagctgcaatacatagcggttagcctgagtatttagctgaccgtcaccggccctactacgttcgtgccctccgacatgacgcatccacatactgcttgcgctcccctgagaatgcagactatctgtatactgcggctcacccagacggtcgtgtaaacgatggctaaacaggctgttggctgcggcaatgttgctgatatagcttccggcctccgggcgataaacacttgggccttccggatccacaacagggggattattgatgggatcgggtgtatccgctggcgttacgccgtcccatttactggtcagataccagtttttctcgtcattccccttccctttagccagcgtgtagacgtaagccccagcttcgacagttccggtggtcagcgcgaagttacctgcagaattaccgccaacctcaatgagttcaataccgttgaccgtttgtgcaccgacgccgccaatgttatcaacccgaacgcgagtgttcccttgggtatcgcctttcacgttcatcttatcggtggggctattatcgccgcccagcgtcgcgttgaacgtcatcaggccattgtttccggtatagttgccgttaacggtcagtacattccccggtttccccccttcgctattcatttgaaccgtgccgccattctccaggttgccgccgatagtggttttagcgacacgcagtgccccccccaggcataacgttcatatcacctgcagtggtgacatttccgctcatcacaccgctgttatggatattaatgtgttgacttgccatattaatggcagagtcggaaccgaaagcaatttccccccccacgatatccgtcgtaccctgatatgccgcggaatcgttgttaagagtcaggatcccggtacccagttttgtcacatcaccgctaccgctgatactgtgcgtcatcgcccagctacgctcagtggagatggtgagcaggccattattgataacggaagcatcacccaggtttttctgctcgttgacgctgagcgcgctgcctgtatcaatgttgaattgccccacaaagcggctattatcgccatccaactctacatctgtcctggcggttgcgctcacgatacccttcccgcttatgctattacgcagttcgccagtcacgttttttagcgttaacagaccgtcattggcaatatttcctctgcctaacccctgagtattatcgaggctgacttccgcatttgggctaatgctggttaacgcattgtagcgtgcattaagcccctcgatagccagcgttccccctgtaacattcaggtttccgccacctgtcagttcaccctgactgatcccacctttatttaccgtcagcgccccctctttgaacaaaacagtgctacccatctgcccggtgaatgtctctaccgtctgcgtgcttccattaagatcgacgatggccgcgttgctgatgttcagttcccgggtgttgccaagtgcaccatccgcatcggtacgtaatgtccccatctgaacgtaggttgccccctgatagtcgttctgaccgttggaaaggctaacctgtcgcaccgtattgattgccagatccccttcaccaccgatttttgcgctcatatcggccgttgcgccataggctccgccatgttcggctaacgtcagcttttgcccaccatggatgttcagcgctttcagcccatagttaacgtacaaaccattacctggtgcggtcgtgaggcggaatccataatcaccctcggcgaccaccgttccgttttgcgcaatgtgtaacgttttgtccgcttccacctcgtcgccctgtaaatcacgtaacgttaaactgccaccgctcccaataaccgtttgcgccttcaccagttgaacgccgacatggctatcgtcgtgttccagcaaattgagcgtcgtcagagggttattcgccatgggatcattccacggtttaggcacgtcgataagcacgtcgcccgtcccgtttacctgatagttacggcctttccaggtgtagtcacccgcgccgacaaccagcgtatcgacgctgatatatccctccgcgagcgtcgcagcaggaatatccgtatcgaaaatgatggtacctccattcatggccagtccaccaatggattgctctccaacttttacgcttgtggtattttcactgtcagactgcaacatcgcgtgagtaagcgcagcggtgttgtcgcgttccagagtgaaggtactgtctttcagttgggcaacaccggcgaattcagtccctgttgcatgggtaaagccaaacatcttgtcggaggaactcagctgcactcgcatcaagccatcgcctttgagcgcattggtcagcgtgtaatctcctgcactgttcgtacttgcgagaatgtcgagcgtaccggggtttgcaatggttacttcactgctccccatgcccgttaccccatctgccgtatgagacgcaatggtcaggaggccgtcattgaccagcgttttaccgctataagtattccctgcattgaacaccgtatggcctgcatcatggatcacttttccgtctttatcgtcacctgtaatcagcatatcgacctggtagccggcatcactgttattggtatgattaaagacaaaaacgccttcgccaagaccaaactccactttcgtcgcattggtgataaatccggcatctgccgccgcctcaccgtgagcagcaccaatgtttagcgttcctacagcaggctcaaaaacacctaagtaaacttctccaccttcgacattcagcgtaccgttattcgtcagggttaacgtacccgtaccagatgtccctacgtacatattgaatgtttcaagaagagagttctgcccatccaccctcacgtcgcccttacttttgtcattgagagctatctgtgtatcacgcgctttaactatacctccggtggtaatattcagttcacccgtgcctaatacaccgacctgtagcaattgtgcgttagtagaacttgtctttaaattccagagactgtccgtactaatattaactatccccttaccggaggcatttcctccgataaatccatagcccgtactattaagggtggcaccattactgacatttacgataccgctaccaaaattaccgacattgatacccacagtatcgaagctacttgtcgcatccatcaggttcagtgtgccgataccgcttgctttatcgcccaaaaaagtaatattttggcttacgaacttaccgccatcgctaatattgaggtttccgacgcccgcaacaccaatggtggtatagacattcttattgacctcccacattccccccgtggtgatgctgacattcccgacgccggtttctccataaccgagactacttcctccgttgctgacaacaagcccctgattactgatattcatttcgccgtggccgtcataaccaagattagttccgagattagtgataacggagttcttatccttaacagtaatgttgcctgtgcctgtttctttcatccccgcagtgataattccgctatctactttgccttcactgctgacattaagttcaccgtcgccagcatcaccgatatagatatagcggaaagcttcgcccgttccgaggaaattccaatgccctttatcggtcacgttgacgacaccgtgggaaccgtcctgaacgcccaccaaactatattctttgttattaatcagtccattattggaaatattgactgtgccattaccgaaatatccattatagagtctgcgtaccgtgatgacagagtcttgatcctgcacattcagggttccgataccggtggcattgccaccgataatcgtattttcagccgtaaccaaccccccctcgcgaatagtcgcctccccagttccttgattaccaatttgaaattcaatactggaatcattattttttattagccactcgccacccttttcaacgacaacctggccattactgcccgcctgatagcctaaaatggcgacgatactactcgtgacgtaacccttatccgtaatatttaaactacctgtgccatagctacctatttcgaataattcggtcgtcagaacagagtcctctccctcaacattgaccgtcccgacgcctcctgtgctagaacctaatcttaaatagcctccatcgacgtgacccttctgtttaatattcagcgtccccgttccggattgacccacatttaaaggccttgcattatttccgctatcatacaatcgccaggtgccacccaaaacattaacggtgccctcactgtcctcattagcgccaatgacgctggtagtaatagtggttaaggaggcattaccgccagccaaaatattaagcactccagtgccataccagccaaccaggtaggcatcataagcaacatcagtatcaatattggtaatctgatcattatcaacttccagacttgcaccagacgcactaccgcttagtgccagcaaaacacccagcgtcaatctactgaatttcgttgtcagtccagaggatttacgcaaattaaccgtgcttgttttacctgccctgcgagttaattcgctgcaggcctgaaatacctgtagagtgcaattccatatcacgcgatagattctattcatataaacgctccatatacaaacaatacagccacgaaagagatgagtcgtcagacattaaaaatgaaacttattaaattgtcagaggtctgtattgagtgttagttggaggtgggaaggtgtcaatttggctaatttgctaatgctttcgaattgatagattaaaaattgcatagttcttattttatttaaatatgaactatgagttattgttgcttaataagaaaactgtttctttcaataggaaaattatcatcatcatatttaacaaagaatagcactaattgctaaaaatcgaagtttattaaaccccttttgcatccattagtgtctttaggaatattcgctataaaataagggttgtgcttaatgctttaagaaaaatagcaattttcccttgaatatcgtactggtgatggaacgatgaatctgcaagctggcttttaacaagccagctctaaaagaagggaaataagaataactatactcaaaaactaacagccacggtcatcatgatgtggctgtcaatgaaattataacccaggcgctttccataagctcgtcgtcagtccatgatcaaccagccccagctgatcctgataaactgcctgccacttatcgcgactatcctgataaagttcatgcttttccgggtctggtgtgtgcgtccgttcccagcgaaccaggcgttctccggtttctgccatactactaaaaattccggcaccgacgccagctgcaatggcacatcctaatgcagtggcttctttgaccaccggaatattgacgggtaatccgctgacatcagcgagaatttgactccataatttccctttactacctccgcctgcaaagactaagctactaggatgaatattgctgaaatcagcaatttgctgcaagttacacgcacttacaatcgccgcattttcttccagcgcacggaacaatgtcgctttgttacatttatccgggtcaatggacaagttaataaaggaaggcgcagcgtgataccaggttttaaagcgcattctgtcggagaagatcggcattacgccccagctcccaggcggcacccgactggccatctcttccagcagcgtataggtgtcgatgcctaaacgttcggcaatcagtttttcttcggcacagaaagcatcgcggaaccagcgcatggtgagtccggtaaaaaagcttatagattcagcttgtaccatgccaggaataacatgaggattaacgcgcacgttcatttctgggtctgtcaccggcgcggctaaatttacaacttgctgccagaatgtgccgccaagaaccgcggtttgtgccggacgcacaacgcctaacccaaggcaaccaagctgcacgtcgcctcctccaacgaccaccggagtgcccgccttcagaccgcagagttccgccgcttgactacttaccacgcccagcaatgtgccggtttctttgacaggagaaagaatatcggcacgtaggccagccatatccagcaatgcaggtttccagtcacgggtggttagatcaagaagtcccgtggtgccagcgttagagggatccaccgccagttcgccgctgagcatataggccagccagtcgctgatcatggtgatggtacttgcctgacggtaaatatcggaacgatggtgcgccagccaaagtaatctggggatggcacttaaagccagtgtttgtccggtcgcgcgataaacttcgttttcaaaggtattgttgtgcagttctttaagttcgctaacttcgcgtgccgctctggcatccacattggcgcaggcccagatcggggctccttcattattatataaaacaatgccttcacgcatgctacatgcgctaacggcagcgatatactccggggctatgccggcgttgtgcagcgcctggcgcatacactcacacgccagttgccagtttttgttgagatcaaattccatagaaccaggaacgtccggtactgccagatgccgccactccgcctgtcccactgctatttgattgccttccaggtcgaatatcacagcccgaatacttccggtgcctgcatccagcgccatcaggtagtacttactttcactaagggtaaagagtcgagccattagattatcctcggcttatgcgttctgtctgttcctctatacgttctccatcattcccggtaataaggtcatgcaaatttaactacgtaaaatcgccgctgctgtgtcctgatcggtaaccagtgcgttgatataaccgcctttcattgcagcggcaattgcttcggctttattttctccccctgccacgccaacccggacgggtatggtcttcagcgcgcttaaaggtaagccaatcagttcgttatgtattttgatattcgtgacaacgtcaccttttgcatcaaaaaagtagcctaaaatgtcgccaaccgccccttttcggccaatcattaactgttcgccctggctgatataaccggagcgaatgattgtcgcatcgtcctgttgactcacagcaccaatgccgacaatcgccacatccgctgcttgcgcggctaacagaacatctttgacgcaattttcattttttagcgtacgggcaatgtcagcggaggatgcccgcaacggagccggaataatattcacactgcacgccgcgttaagctgcccgattcccgtcatataagaaccgacgccaccggagagcgtgaccaggcgaatttgctgactgctaataaaaccacttaagcgttgcagcgtattcatggttgcctcgccaaaaccaatcgccagcatctgttgtggttgaagtaaactcatcaacatatgcgccgcgcctatccccagtcgcccaccgacatcagcatccgcaagcccagggatcacccggacatgttgcaggctaaactgacgacgtaattgagtttcatattccagacagccttcaaagcgagaattaatctgtacgcgaataatgccggactgatgccctttctccagcaatcggctcactttcaaacgtgtcaggccgagacgatcgctgatctcgctctgggtcagcccgtcgtgatagtaaaaccacgcgatccgcgcgacctgttcttcttcacacattccctgttcactaattgcgctatcgttgattgtcataattcattcttcactttgaacatatttaaatctttaatgcaattgttcagttcttgctcatttatatctgtgatggcaaccacagtttgactctacgagcatgaacaaacgcaaccgtgaaaatcaaaatagcataaattgtgatctattcgtcggaaatatgtgcaatgtccacctaaggttatgaacaaattaaaagcagaaatacatttgttcaaaactcacctgcaaaactgaacgggggaaatatgcaaacgagtgatacccgcgcgttaccgctactttgcgcccgcagcgtttataaacagtatagtggggtcaatgtcctgaaaggcatcgattttacgttgcatcagggggaggtccacgccctgctcggcggcaatggtgccggtaaaagcacgttaatgaagattattgccggtattacccctgctgatagcggtacgctggagattgagggcaacaactacgtcagattaacgccagttcatgctcatcagctgggtatttatctcgttccccaggaaccgctgcttttcccaagcctgagcataaaagaaaacatcctgtttgggctggcaaaaaaacagctctccatgcagaaaatgaagaacttgctggcggcgctgggctgccagtttgatctgcatagtctggcaggaagcctggatgtcgccgatcgccaaatggtggaaatcctccgcgggctgatgcgcgacagccggattctgatcctcgatgaacctaccgccagccttacccctgcggaaaccgaacgcttgtttagtcgcttgcaagagctgcttgctactggcgtgggtattgtttttatcagccataagctgccggaaattcgccagattgccgatcgaattagcgtgatgcgcgacggaaccatcgccttaagcggcaaaaccagcgaactgtctaccgacgacattattcaggccatcaccccagcggtacgggaaaaaagcctctctgccagccaaaaattatggctggagttacctggtaaccgcccacaacatgccgccggaacgccggtgctgacactggaaaatctgaccggcgaaggtttcaggaatgtcagcctgacgctcaatgccggagaaattctgggcctggctgggctggtgggggccggacgcacagaactggccgagacgctctatggtctgcgtactttgcgtggcggacgcattatgctgaatggtaaagagatcaataaattatccactggagaacgtttactgcgcggtctggtttatctgccggaagatcgccagagttccggactgaatctcgatgctagcctggcctggaacgtctgcgcccttactcataaccttcgtggattctgggcgaaaaccgcgaaagataatgccaccctggaacgttatcgtcgggcgctgaatattaaattcaaccaaccggaacaagctgcacggacattatccggtggcaaccagcaaaaaatcctcattgccaaatgcttggaagctagcccgcaagtattgattgtcgatgagccgacgcgcggcgtggatgtcagcgcccgtaatgatatctaccagctgttgcgcagcatcgccgcacaaaatgtggctgtgctgcttatctcctccgacctggaagagatcgaactgatggcagatcgtgtgtatgtgatgcatcagggcgaaattacccactctgcactgaccgagcgcgatattaatgtcgagactattatgcgcgttgccttcggcgatagtcagcgtcaggaggcgagttgctgagctaaagtcagcgtcaggaggcgtcatgctgaagtttattcagaacaaccgtgaaatcacggcactgctggcggtggtgctgctgtttgtattacccggttttctcgaccgccagtatttaagtgtgcaaacgctgaccatggtttatagcagcgcgcaaatcctgatcctgctggcaatgggcgcgacgctggtaatgcttacgcgcaatattgatgttagtgtgggtagcattaccggaatgtgcgcggtgctgttggggatgttactgaacgcaggatatagtctacctgttgcttgtgtcgcgactttactgcttggtttgctcgcgggatttttcaacggtgtcctggtcgcgtggctaaagatccctgccattgttgccacccttggcacgttagggttgtacagaggcatcatgttgctgtggactggcggcaaatggattgaagggttacccgccgaactgaaacagctctccgccccgctgctgcttggcgttagtgcaattggttggttgacgataattctggtggcatttatggcctggctgctggcaaagacggcgtttggacgcagtttttatgccacgggcgataatttacagggcgctcgtcaactgggcgttcgtactgaagccattcgcattgtggcatttagcttgaacggctgcatggcggcactggcgggaattgtgtttgctagccagattggttttatccccaaccagaccggtaccgggctggagatgaaagcaattgcagcctgcgtgctgggcggcattagtttgctcggtggttccggtgcgatcattggtgcggtactcggcgcatggttcctgacgcagatcgatagcgtactggtgctgttgcgcattccggcatggtggaatgattttatcgcgggtctggttctgctggcggtgctggtgtttgatggacgcctgcgttgtgcgctggaacgtaatctacggcggcaaaaatatgcccgctttatgacgccaccgccatccgttaaacccgctagcagtggtaaaaaacgggaggccgcataatgcgtattcgctacggttgggaactggctcttgccgcactgctcgttattgagattgtcgcatttggtgcaattaacccgcgaatgttagatctcaatatgttgctgttcagcaccagtgactttatctgcattggcattgtcgccctaccgctaacgatggtgattgtcagtggcgggatcgatattagctttggtagcaccatcggcctctgcgccattgcattgggcgtactgtttcaaagtggtgtgccgatgccgctggcgatactcctgaccttactgctcggcgcattgtgcgggctgatcaacgccggattaattatctataccaaagttaacccgctggtgattacgcttggcacgctgtatctgtttgccggaagcgctctgctgctttccggtatggccggagcgacggggtacgaaggtattggtggattcccgatggcgtttacagatttcgctaacctggatgtgctgggactccccgttccgctgattatcttcctgatatgtctcctcgttttctggctctggctgcataaaacccatgccggacgtaatgtgtttttgattgggcaaagcccgcgcgtggcgctttatagcgcgattccagttaaccgtaccttatgtgcgctctatgccatgacggggctggcgtctgcggtcgccgctgtgctgctggtaagctattttggtagtgcacgttccgatctcggtgcgagctttctgatgcccgccatcaccgccgtggtgcttggcggggccaatatttatggtggttccggttccattatcggcaccgccattgcggttttattagtgggatatttgcaacaaggtttgcaaatggcaggagtgccaaatcaggtgtccagcgccctttccggtgcgctacttatcgtcgttgtcgtaggtcgttccgttagcctgcatcgccagcaaattaaagagtggctggcgcgtcgggccaataacccattgccataaaggatatcttcatgacacttcatcgctttaagaaaatcgccttacttagcgctcttggcattgccgcaatctctatgaatgtgcaggccgcagagcgtattgcatttattcccaaactggttggcgtgggattttttaccagcggtggcaacggcgcacaacaagcgggtaaagagctgggcgttgatgtgacctacgacgggccgacagaacccagtgtttctggtcaggtacagttgattaataacttcgtcaatcaaggttataacgccattatcgtttctgcggttagccctgatggcttgtgtccggcactgaaacgcgccatgcaacgtggtgtgagagtgctgacctgggactctgatactaaaccggagtgccgctcttactacattaatcagggaacgcccgcccagttaggaggtatgttggtggatatggcggcgcgtcaggtgaataaagacaaagccaaagtcgcgtttttctacagtagccccaccgttacggaccaaaaccagtgggtgaaagaagcgaaagcgaaaatcgccaaagagcatccaggctgggaaattgtcactacgcagtttggctataacgatgccactaaaagcttacaaaccgcagaaggaatattaaaagcgtatagcgatctcgacgccattatcgcccccgatgccaacgccctgcccgctgccgcacaagccgcagaaaacttgaaaaatgacaaagtagcgattgtcggattcagtacgccaaatgtgatgcgcccgtatgtagagcgcggcacggtgaaagaatttggcctgtgggatgtggttcagcaaggcaaaattagtgtgtatgtcgcggatgcattattgaaaaaaggaagtatgaaaacgggcgacaagctggatatcaagggcgtaggtcaggttgaagtcagcccaaacagcgttcagggctatgactacgaagcggatggtaatggcatcgtactgttaccggagcgcgtgatattcaacaaagagaatatcggcaaatacgatttctgatgtgcattacttaaccggagtaagttatggcagatttagacgatattaaagatggtaaagattttcgtaccgatcaaccgcaaaaaaatatcccttttaccctgaaaggttgcggtgcgctggattggggaatgcagagtcgcttaagccggatatttaatccgaaaacgggtaaaaccgtgatgctggcttttgaccatggttattttcagggaccgactaccggacttgaacgcattgatataaatatcgccccgctgtttgaacatgccgatgtattaatgtgtacgcgcggcattttgcgcagcgtagttccccctgcgaccaataggccggtggtactgcgggcgagtggtgcgaactctattctggcggaattaagtaatgaagccgtggcgttaagcatggatgacgccgtgcgcctgaacagttgcgcggtggcggcgcaggtttatatcggcagcgaatatgaacatcagagcatcaaaaatattattcagctggttgatgccggaatgaaagtgggaatgccgaccatggccgtgactggcgtgggcaaagatatggtgcgcgatcagcgttatttcagcctcgcgactcgaatcgccgctgaaatgggggcgcaaattatcaaaacctattatgtcgaaaaaggttttgaacggattgttgccggatgtccggtacccattgttattgctggcggtaaaaaattaccggagcgcgaggcgctggaaatgtgctggcaggctatcgatcagggcgcttctggtgtggatatggggcgtaatattttccagtctgaccatccggtggcgatgatgaaagccgtacaggcggtggttcaccataacgaaacggctgatcgggcatatgaactctatctgagtgaaaaacagtaactgcggatctaaggagaagaattatgcacgtcacactggttgaaattaacgttcatgaagacaaggttgacgagtttatcgaagtttttcgccagaaccacctgggctctgtacaggaagaaggcaatttgcgcttcgatgtcttacaggacccggaagtgaatagccgcttttatatctacgaagcctataaagatgaagacgcagtggcgttccataaaaccacgccccactacaaaacctgtgtcgcgaaactggaatctttaatgaccgggccgcgtaaaaaacgtctgttcaatggtttgatgccgtgaggcgaatttatcaattttatctacaattggggtaacgcgctgacgggagtaaaaaaatgtctgactggaacccctctttatatctacacttttccgctgaacgaagccgtccggcggtggagctgcttgccagagtgccgctggaaaatgtcgaatatgttgccgatcttggctgtggcccaggtaacagcaccgcccttctacaacaacgttggcctgcggccaggataacaggcatcgacagctctccggcgatgattgctgaagcgcgcagtgctttgccagactgccagttcgtggaagcagacatccgcaactggcaaccggtacaggcactcgatctgatttttgctaatgccagtctgcaatggctgcccgaccactacgaattgtttcctcatctggtttctttacttaatccgcagggcgtgctggcagtacagatgccagataactggctggagccgacccatgtgctcatgcgcgaagttgcctgggaacaaaactacccggatcgcgggcgtgagccgttggctggcgttcatgcttactacgatattttgagcgaagccggatgtgaggtcgatatctggcgaaccacctactatcaccagatgccgagtcaccaggcgattatcgattgggtgactgccactggattacgtccgtggttacaggatctgaccgagagcgaacagcagctttttcttaagcgctaccatcagatgctggaagagcagtatccactgcaagagaacggacagatactgctggcatttccgcgtctgtttattgttgcccggcgtatggagtaaatatcacgtcagctggtaatgacgatcgggaagaatttttgctggaatttcggcttcatcgttcatctgtaacaggtcaatttcaatagcgttgcagatggcatccagtggtaaatcattgttttcagtaccgaacggatcttccagttcttccgccagacaatccaggctaataaaagtgtaggaaatcagcacagagataaaaggcgtcatgtaatgcaggtccacgaccagcgcgaacggcagcatgatacaaaacagataaacggtacgatgcaaaatcagggtgtaggcaaagggaattggcgtataggcaatgcgctcgcatcctgccaggaccgcactaatatcattaagccgatcgttgaggctaataaacaggatatcactaagctgtccattgcggcgctgaaccgccaaccattctcccattattaacaagatacggttagctggagagttgctagccagtacacgctgaagatcttcagtcttgagataatgagccagcacttccgcctgtggctgtttgcgtaatgtcatgcgtaaacagtgggcgaaagcgatttgcagccgggcaaactcccttacacttgcgctatccggcaatgtcgtttttacctcgcgcagtaagctccgactggcaatcatcaactgcccccaaagttttcgcgcttcaacgtaacgggcgtacccggcattattacgaaaaccaagaaaaatggcgatggcgacaccgagaatgctgaacggtgcgagggtgaatttgatgcccagatgcgtgtaccagggcagcatgaaaataacagcgatagaaaagagaaaattgagtagtaagcggctggatatcttggataatacactgccgtgccagacaaaaatacggcgcagccagtgttgttgtggacgaacaatcatggttatcttcaggcgtggaaaagtcgccctattaaacgtgattacgatcacattctcaagacgctacttacaaattacctacaagcttacaacattagcaggcgctgcatgtggcacctgttaatgataaaggcatataggatgttgtaactaatatggtgaaataagaaacccggtcgaaaccgggttcagaagtaacggtgttattagcacaacggacgtacagcttcgcgcatccctttttcgagaatcgcatccaggtcattagcaacctgctcgaccagaccaggcacttgcgtcaggtcctgctcccagtggtctttttctgccaaaacaatcgctaccagttcctgggtgccgataacacggtcacgatgctggctccagagttgctgataacgttccagccagtgtgcatcgtcctgtaccggatatgtttcgccgttacgctcaccacgatagaacgcaatcaatgccgctaatgcgaaagtaaggcgcgccggaagtgtgccgtttgccttctgccctgccagcagctgtggcaggatgcgggtgcggaacttggtcataccgttgagcgcgatagacagcagctgatgcttaatgtacgggttacggaaacgcccggtgactgcactggcgaaagattccagttcatcacgaggcaaatccagtaccggaataatttcttcgtagatagctttttcaacgaatgcgcaaatttcagcatcgttcatcgcttcacctacggtatccagccctgcctggaacgccaccggcaccagcgcggtgtgcgcaccgttgaggattgccactttgcgttctttgtacggtttaatatcgtcaacaatcagcacgttgagcggatatttgtccagacgcagttcagtcgctaaggatttcggtccctgaatcacaaacaggtaaaagtgttcagcggtgtcgagaaaaccatcgtgataacccagttcttcttccagtttagccacttcatcgcgcggataaccggtaacgatacggtccaccagcgtagaacagaagctgttagcctgatccagccattgaataaatgcttctggcagtgcccactcttgcgcatagcgcagcaccagttcacgcaacgcgtcgccattgtagtcaatcaactcacacggaatgatgatccaacctttatccagcgcaccgttgaaatggctaaagcgttcgaacagcagacgggtcagttttgccggatagcttaccgctggcgcgtcatcgaatttatcgcccgcatggtagctgatacccgcttcggtggtgttagagaaaacaaagcgcatttccgggttgtgcgccagtttcaggaattcatcgtattcactgtagacgctgatttcacgattaacgctgcgaatcagacgcgcgtcgctgaccgcttcccccttctcattcaggccacggataatggtggtgtacagaccatcctgcgtgctcagactcggcgggaaactagtttcaatcggacgaacaacgaccacgccagaattcagatcggtgtgctcattcaggagatcgatttgccagtcaacaaaggcgcgcaggaagttaccttcaccaaactgaatgatacgttctggatactgtgcaccgggaaaatcgcgacgatttagtgttttcacaatgggttcccttctgattagtcatacaacctgtttgaattggtacgacaggttagcaaactttaatacgccgaacccctgttttgatcaactcctgatgattaatgagcagttttatgagaaaagtgtggcgcggatcatggtttaatcgaggaaaaacgccttttcctggatcataaagtggtagaacacattgcattcaaatcgcgcgtaatgaataaagatgtcagacaacttcctcaccgtaacgcatagtgctggtacggttgcgcccatctttcttgctgcgatacagacacgtatcggcttcgaccatcaatttattaaagtcatcggtcagcgttaggtagcttgcgcgaccactaccgacgccaatacttaccgtgagataaagcgttttttgttgccaggtgaatggttgcagttcaacgcctttacggattttttccgccattagcagaccatcgacaggattcacgctcggcactgcaacagcaaattcttcgccgcccattcgcgccaccagccccttatcaccgacaatcttctgaatatgccgggcaaacacgcttaacactttatcgccacattcatgtccatagttatcgttaatgcttttgaaatagtcgatatcaagcagcatgacagtcagatgttgtgtctgtttcaggcttggacttttcagcgcctcataaagaccggaccgactgtaaacctgagtcagaaaatcaaagtcggctcgcagcgcaacttgcttcattaggctattgatcgctgccacgctaaaagaaaccataattgggcatatcgccatcgtggcaataccgagacgtgcggagaacatttgcggaatggagaacgggctaccgacgctgatatcaatcacgctatttgccaccagtacgatttccaccgcaccggtgacaaaggtcaacagacatgttacctgcggcgtatagcgcactgcacaccagattaatgcaggcagcgggaacgccagactccccgctccgccaatgactacgctggcaataacgctcacaataagcgcgatggcgggcatcatctgttctgctttaaagcgcggcagcactccaggaatagccaacgtcagcatacaaggcacgatcaacacgcccgtactgaattgctcactgaaccagtccgcaagcaaaggccagaaatccagactatcaatactgaccgaaccaagatagcatgttcgctgacagcggcggcaaataaaggtaccctgggaatgctattttgtcgttttccgcaattctcatggctgattcatctgtacaaccagccagtgatagattaccgccacgatataacgttgttgttcttcgcttaagctaacaccctgcggaatgttatgccacttagccagacaaccgcgacagcaggtcgcggtggcgtgctgagcgataaacaccggatgcccgcgcatgggggtttgcttaccgtcattagccggtaatgccggagcaagacgtttagcgacaaaatccgccgcatgttgttcgatgactggcgcgcctttctccaggcaatactgacgctctttcatgcccagacgaaagcgagagcgaaatttactacgggataaacgcgcgaagagtggatcgagagactgcattaataaacgctacgccctaactgtttcgtcaattgttcaagaacggcaatacccgcaaggctgttacctgcatcatccagttccggactccagacagcgatggccatttcatgcggaacaatcgccacaataccgccaccaacgccagatttcgccggtagccccacccgccaggcaaactcccccgcgttctggtacataccactggtcgccatcagcgcgttaatttgccgcgcctgcattggcgtcaccactggttcatcaatatgaatagctttcccctgattagccagaaagacaaacgtccgggccagctctacacagctcattttcagagcgcagtaatgaaagtagttttgcagaacggttgtcacgtcatgatggaaattgccaaagctcttcatcagccaggcgatagccgcatttcgcgcggaatgttcaaattcggaacgcgctaccaccgtatcgtaggaaatatcagacacaccgcttaagccgcgcacgacttccagcatacgttgccgtggtgcgcttaatcgcccttgcaacatatcgcagaccaccagcgcaccggcattaatgaacggattacgcggtataccctgctccatttccagttgcactaaggaattgaacggacttccagacggatctttgccgacgcgttgccagatttcctcttcggagtaatgacgcatggcgacaacgagactcagcactttggaaatagactgaatggaaaaacgttcttgcgcgtctccggcctgaaaaagctgtccgtcaacggtacagatagcaatccccaatcgggaaccgtctactgtagccagcgccggaatataatccgcgactttaccctgaccaatgagcggccgcacttgccgcaagatgttttctaaaattgcattatccatggcgactgccactttctactcctggaccgcaggtctgaaaagacctgcgagtatatcagagctgaatatgtcgcgtcagatccggtctttccacaccgtctggatattacagaattcgtgtaagccgaaatgggaaagctcacgaccaaagccactctttttcacgccaccaaaggccactcgcgcgtcgctggcacaataaccattgataaacaccccaccgcattccagacgtgccgccatctgtctggcctgtgtttcgtcagtggtaaaaatggtcgcactaaggccgaactcactatcattagccagttccagtgcatgttctgcatctttcgcaatggtgattgccgcaacggggccaaacatttcttcccgaaacgcggtcatttctggggtaacattcgccagaaccgttggcggatagtagttacctgccccagccatcttttccccgcccagtaacaaacgcgcaccctgcgccagggttttctccacctgatgatgcagctcatcacgtaaatcaaaacgagccattggtccgagagcgttctcttcgtcacggggatcgcccattttcaaggctgccgcagctgccacaaaacgttcggtaaatgcgctagcaattccctcttcgataataaagcgttttgccgctgcacatacctgtccggtattctgataacgtccggctaccgccgctttcaccgccagttccagatcggcatcgttaagcacaataaacggatcgctaccgcccagttccagtacgcattttttcagtgccgctccagcctgtgcgccaatagccgctcccgcacgaacacttccggtcaccgtgacagcagcaatgcggctgtctttaatcatctgactgacaccgtcgttgtcggcattcagccagccatatacgccttgtgggatacccgcatctttaaacacctgggcaatgagctgtgcacagcccatcacattcggcgcatgtttaagtaagtagccgttacctgcaagaatgatgggaacagcgccacgcatcacctgccataacggaaaattccacggcataatcgccagaatcgtccccaacggtcgatactcaataaccgcctgctgattttccaccagcgtaggttccgccttcagcattgccggaccatgttctgcataccagtcacacaaattcgcgcttttcgccacttcagcgcgcgcctggttgattggtttgcccatttcgcgggtgatcatttgcgccatttcttcgctacgagcgcgcagagccttaccgatatcacgcagtttttcagcacgataatctatatttgtctcgcgccagtcgcgaaagcctgctgccgccagctgaagtgcgttttcgatatcgtcagcgccagcccacggcagcacagaaagttgttcacccgtggcaggatttatgctaattgcatgagttgccggagtaatggtcatcggggtatctcctttatgagtcatggtatgaagatacgcagatttactcttgctttaaaatgaataatattaagccacttattcacgaatcgagaatgctatggatctgacccaactggagatgttcaacgcggttgccgaagctggcagcataacccaggctgcagcaaaagtgcatcgcgtgccgagcaatctcactacccgtctgcgccagctggaaacagaactgggggttgatctgtttattcgcgagaatcagcgtttacgtctctctcctgccgggcataactttttacgctatagccaacaaattctcgcgttagtggatgaagcgcggagcgttgtcgctggcgatgagccgcaaggtttattttctcttggtagcctggaaagcaccgctgcagtgcgcattccagccacgctggcggaattcaaccgtcgttatcccaaaattcagtttagtctttccaccggcccttccggcactatgctggatggtgtactggagggaaaactgaatgcggcgtttattgatggacccattaaccatactgccatcgacgggataccggtataccgcgaggaactgatgatcgtcacgccacaaggatatgcgccagtaacccgtgccagtcaggttaatggcagtaacatttatgccttccgcgccaattgtagctatcgtcgccacttcgagagctggtttcatgctgacggtgccgctccgggaactatccatgagatggagtcttatcacggaatgttggcctgtgtgatcgcaggagcaggcattgcgcttattccgcgctctatgctggaaagtatgccggggcatcaccaggttgaagcgtggccgttagctgagcaatggcgttggttaacaacctggctggtctggcgtcgtggtgcgaaaacacgtccgctcgaggcatttattcaactgctggatgtgcctgacagcgcaagacagggatatcaatgagctatttttgatagttcttgcggttaatatgctctatatagtgatgttccgatgacttatgactatatggggcaaatatggttacgccagtaagcatcagcaattacatatctcttcctgatgattttcccgtacgtaatattgcaccgcaggtaaaagaagttttaaaggattttattgatgcacttagtacaataatatgtaatgaagagtggcgcacgtctttaaacatcaacagtgccacaaaaaagatatttaataaccttgacaacttaagttatattcagaggacttcttttcggggtaacgacacgctatacaatgaaaaggttcagtttaaactcacttatcccgccaggaatggaagacacaaagaaaatattgaatttcaggtagtaataaatttaagccctatttatttagataattttcgccatgatggagaaattaatattttttgcgctcccaacccaaagcctgtcactatggggcgcgtatttcagaccggcgtcgagcgtgtactctttctgtttctgaatgattttattgaacaatttccaatgatcaaccctggtgttcccatcaaaagagcgcatacaccacatattgaacccctgcctagcgatcaccataccgctgcagattacttacgccagtttgatttgcttgtcctgaattttatctctcgcggtaattttgtcatactcccccgattatggaataactctgaggttcacagatggttcgtcaataaagatcctaacttgatcaccgccattctcgacataacggacagcgaattaaaagaggatttgttgcaaagcctgatggatagtttaggttctaacaaacatgtactacccgaagtctgcatctgctttttatcccttttagcagaacaagaatctcctcattttcagaacttgtttttatttttcgccaatatgttattgcactatcaccaatttatgaatcccaatgaaagtgatttgaatgacgtgttgatgccagcaagtttaagtgatgataaaattatcaaacatatggcgcgcaggaccctcaaactgtttgtaaaaaatgaaacaccgccaaaagttactcacgaagacctggtgaaaaacaggcctcgctcccctgtcagaccacctatacccgcaaccgccaaaacgccagacctccctgaacgtcattaaaccgtgatgttaccgactctctgacgcgtgaaagaatcagcgtcagagaaacggaaaacgcgatccagatcacaaatgcattgtattcacatcattaaccgttttaagatcatttcatcactttttcgcaactcacccgataatctgttatgacaacaaacactgtttcccgcaaagtggcgtggctacgggtcgttacgctggcagtcgccgccttcatcttcaacaccaccgaatttgtccctgttggcctgctctctgacattgcgcaaagttttcacatgcaaaccgctcaggtcggcatcatgttgaccatttacgcatgggtagtagcgctaatgagtttgccttttatgttaatgaccagtcaggttgaacggcgcaaattactgatctgcctgtttgtggtgtttattgccagccacgtactgagctttttgagctggagctttaccgttctggtgatcagtcgcattggtgtggcttttgcacatgcgattttctggagcattacggcgtctctggcgatccgtatggctccggccgggaagcgagcacaggcattgagtttaattgccaccggtacagcactggcgatggtcttaggtttacctctcgggcgcattgtgggccagtatttcggttggcgaatgaccttcttcgcgattggtattggggcgcttatcacccttttgtgcctgattaagttacttcccttactgcccagtgagcattccggtagtctgaaaagcctcccgctattgttccgccgcccggcattgatgagcatttatttgttaactgtggtggttgtcaccgcccattacacggcatacagctatatcgagccttttgtacaaaacattgcgggattcagcgccaactttgccacggcattactgttattactcggtggtgcgggcattattggcagcgtgattttcggtaaactgggtaatcagtatgcgtctgcgttggtgagtacggcgattgcgctgttgctggtgtgcctggcattgctgttacctgcggcgaacagtgaaatacacctcggggtgctgagtattttctgggggatcgcgatgatgatcatcgggcttggtatgcaggttaaagtgctggcgctggcaccagatgctaccgacgtcgcgatggcgctattctccggcatatttaatattggaatcggggcgggtgcgttggtaggtaatcaggtgagtttgcactggagtatgagcatgattggttatgtgggcgcggtgcctgcttttgccgcgttaatttggagtatcattatatttcgccgctggccagtgacactcgaagaacagacgcaataattgaaaggcccattcgggccttttttaatggtacgttttaatgatttccaggatgccgttaataataaactgcacacccatacataccagcaggaatcccatcagacgggagatcgcttcaatgccacccttgcccaccagccgcataattgcgccggagctgcgtaggcttccccacaaaataaccgccaccaggaaaaagatcagcggcggcgcaaccatcagtacccaatcagcgaaggtactactctgacgcactgtggacgcgctgctaataatcatcgctatggttcccggaccggcagtacttggcattgccagcggcacaaaggcaatattggcactgggttcatcttccagctcttcgctcttgcttttcgcctccggactatcaatcgctttctgttgcggaaagagcatccgaaaaccgataaacgcgacgattaagccgcctgcaattcgcagaccgggaatgctaatgccaaatgtatccatcaccagttgcccggcgtaatacgccaccatcatgatggcaaatacgtacacgctggccatcaagctctgacgattacgttcggcactgttcatgttgcctgccaggccaagaaataacgcgacagttgttaatgggttagctaacggcagcaacaccaccagccccaggccaattgctttaaacaaatctaacattggtggttgttatcctgtgtatctgggttatcagcgaaaagtataaggggtaaacaaggataaagtgtcactctttagctagccttgcatcgcattgaacaaaacttgaaccgatttagcaaaacgtggcatcggtcaattcattcatttgacttatacttgcctgggcaatattatcccctgcaactaattacttgccagggcaactaatgtgaaaagtaccagcgatctgttcaatgaaattattccattgggtcgcttaatccatatggttaatcagaagaaagatcgcctgcttaacgagtatctgtctccgctggatattaccgcggcacagtttaaggtgctctgctctatccgctgcgcggcgtgtattactccggttgaactgaaaaaggtattgagcgtcgacctgggagcactgacccgtatgctggatcgcctggtctgtaaaggctgggtggaaaggttgccgaacccgaatgacaagcgcggcgtactggtaaaacttaccaccggcggcgcggcaatatgtgaacaatgccatcaattagttggccaggacctgcaccaagaattaacaaaaaacctgacggcggacgaagtggcaacacttgagtatttgcttaagaaagtcctgccgtaaacaaaaaagaggtatgacgatgtccagacgcaatactgacgctattaccattcatagcattttggactggatcgaggacaacctggaaagcccactgagtctggagaaagtgagtgagcgtagcggttactccaaatggcacctgcaacggatgtttaaaaaagaaaccggtcatagtttaggccaatacatccgcagccgtaagatgacggaaatcgcgcaaaagctgaaggaaagtaacgagccgatactctatctggcagaacgatatggcttcgagagccaacaaactctgacccgaaccttcaaaaattactttgatgttccgccgcataaataccggatgaccaatatgcagggcgaaagccgctttttacatccattaaatcattacaacagctaattgaaaacgtgacaacgtcactgaggcaatcatgaaaccacttagttccgcaatagcagctgcgcttattctcttttccgcgcagggcgttgcggaacaaaccacgcagccagttgttacttcttgtgccaatgtcgtggttgttcccccaagccaggaacacccaccgtttgatttaaatcacatgggtactggcagtgataagagcgatgcgctcggcgtgccctattataatcaacacgctatgtaatttgttctggccccgacatctcggggcttattaacttcccacctttaccgctttacgccaccgcaagccaaatacattgatatacagcccggtcataatgagcaccgcacctaaaaattgcagacccgttaagcgttcatccaacaatagtgccgcacttgccagtcctactacgggcaccagtaagcttaacggtgcaacccgccaggtttcatagcgtcccagtaacgtcccccagatcccataaccaacaattgtcgccacaaacgccagatacatcagagacaagatggtggtcatatcgatagtaaccagactgtgaatcatggttgcggaaccatcgagaatcaggctggcaacaaagaagggaatgattgggattaaagcgctccagattaccaggctcatcaccgccggacgcgtactgtggctcatgatctttttattgaagatgttgccacacgcccaactaaatgctgccgccagggtcaacataaagccgagcatcgccacatgctgaccgttcagactatcttcgattaacaccagtacgccaaaaatcgctaaggcgatccccgccaattgtttgccatgcagtcgctccccgaaagtaaacgcgccaagcatgatagtaaaaaacgcctgtgcctgtaacaccaggctagccagtccagcaggcataccgaagttaatggcacaaaaaagaaaagcaaactgcgcaaaactgatggttaatccataccccagcagcaaattcagtggtactttcggtcgtgcgacaaaaaagatagccggaaaagcgaccagcataaagcgcaaaccggccagcatcagcggtggcatgttatgaagccccactttgatgaccacaaaatttagcccccatacgaccactaccagtagcgccaacaccccatcttttcggctcattctaccgcctctgaatttcatcttttgtaagcaatcaacttagctgaatttacttttctttaacagttgattcgttagtcgccggttacgacggcattaatgcgcaaataagtcgctatacttcggatttttgccatgctatttctttacatctctaaaacaaaacataacgaaacgcactgccggacagacaaatgaacttatccctacgacgctctaccagcgcccttcttgccagcagcttgttattaaccatcggacgcggcgctacgctgccatttatgaccatttacttgagtcgccagtacagcctgagtgtcgatctaatcggttatgcgatgacaattgcgctcactattggcgtcgtttttagcctcggttttggtatcctggcggataagttcgacaagaaacgctatatgttactggcaattaccgccttcgccagcggttttattgccattactttagtgaataacgtgacgctggttgtgctcttttttgccctcattaactgcgcctattctgtttttgctaccgtgctgaaagcctggtttgccgacaatcttagctccaccagcaaaacgaaaatcttcagtatcaactacaccatgctaaacattggctggaccatcggtccgccgctcggcacgctgttggtaatgcagagcatcaatctgcccttctggctggcagctatctgttccgcgtttcccatgcttttcattcaaatttgggtaaagcgcagcgagaaaatcatcgccacggaaacaggcagtgtctggagcccgaaagttttattacaagataaagcactgttgtggtttacctgctctggttttctggcttcttttgtaagcggcgcatttgctagttgcattagtcaatatgtgatggtgattgctgatggggattttgccgaaaaggtggtcgcggttgttcttccggtgaatgctgccatggtggttacgttgcaatattccgtgggccgccgacttaacccggctaacatccgcgcgctgatgacagcaggcaccctctgtttcgtcatcggtctggtcggttttattttttccggcaacagcctgctattgtggggtatgagtgctgcggtatttactgtcggtgaaatcatttatgcgccgggcgagtatatgttgattgaccatattgcgccgccagaaatgaaagccagctatttttccgcccagtctttaggctggcttggtgccgcgattaacccattagtgagtggcgtagtgctaaccagcctgccgccttccagcctgtttgtcatcttagcgttggtgatcattgctgcgtgggtgctgatgttaaaagggattcgagcaagaccgtgggggcagcccgcgctttgttgatttaagtcgaacacaataaagatttaattcagccttcgtttaggttacctctgctaatatctttctcattgagatgaaaattaaggtaagcgaggaaacacaccacaccataaacggaggcaaataatgctgggtaatatgaatgtttttatggccgtactgggaataattttattttctggttttctggccgcgtatttcagccacaaatgggatgactaatgaacggagataatccctcacctaaccggccccttgttacagttgtgtacaaggggcctgatttttatgacggcgaaaaaaaaccgccagtaaaccggcggtgaatgcttgcatggatagatttgtgttttgcttttacgctaacaggcattttcctgcactgataacgaatcgttgacacagtagcatcagttttctcaatgaatgttaaacggagcttaaactcggttaatcacattttgttcgtcaataaacatgcagcgatttcttccggtttgcttaccctcatacattgcccggtccgctcttccaatgaccacatccagaggctcttcaggaaatgcgcgactcacacctgctgtcacggtaatgttgatatgcccttcagaatgtgtgatggcatggttatcgactaactggcaaattctgacacctgcacgacatgcttcttcatcattagccgctttgacaataatgataaattcttcgcccccgtagcgataaaccgtttcgtaatcacgcgtccaactggctaagtaagttgccagggtgcgtaatactacatcgccgattaaatgcccgtaggtatcattaaccaatttaaatcggtcaatatccaacaacattaaataaagattcagaggctcagcgttgcgtaactgatgatcaaaggattcatcaagaacccgacgacccggcaatcccgtcaaaacatccatattgctacggatcgtcagcaaataaattttgtaatcggttaatgccgcagtaaaagaaagcaacccctcctgaaaggcgtcgaaatgcgcgtcctgccagtgattttcaacaatagccagcattaattcccgaccacagttatgcatatgttgatgggcagaatccattagccgaacgtaaggtaattcatcgttatcgagtggccccagatgatcaatccaccgaccaaactggcacagtccataagaatggttatccgttatttctggcttactggcatctctcgcgaccacgctgtgaaacatactcaccagccactggtagtgggcatcgatagccttattgagatttaacaagatggcatcaatttccgttgtcttcttgatcattgccactcctttttcacagttccttgtgcgcgctattctaacgagagaaaagcaaaattacgtcaatattttcatagaaatccgaagttatgagtcatctctgagataacattgtgatttaaaacaaaatcagcggataaaaaagtgtttaattctgtaaattacctctgcattatcgtaaataaaaggatgacaaatagcataacccaataccctaatggcccagtagttcaggccatcaggctaatttatttttatttctgcaaatgagtgacccgaacgacggccggcgcgcttttcttatccagactgccactaatgttgatcatctggtccggctgaacttctcgtccatcaaagacggccgcaggaataacgacattaatttcaccgctcttatcgcgaaaaacgtaacggtcctctcctttgtgagaaatcaaattaccgcgtagactaacgctagcgccatcgtgcatggtttttgcgaaatcaacggtcattttttttgcatcatcggttccgcgatagccatcttctattgcatgaggcggcggtggcgctgcatcctgttttaaaccgccctggtcatctgccaacgcataaggcatgacaagaaaacttgctaatacaatggcctgaaatttcatactaactccttaattgcgtttggtttgacttattaagtctggttgctatttttataattgccaaataagaatattgccaattgttataaggcatttaaaatcagccaactagctgtcaaatatacagagaatttaactcactaaagttaagaagattgaaaagtcttaaacatattttcagaataatcggatttatatgtttgaaaattattatattggacgagcatacagaaaaagcaaatcacctttacatataaaagcgtggacaaaaaacagtgaacattaatagagataaaattgtacaacttgtagataccgatactattgaaaacctgacatccgcgttgagtcaaagacttatcgcggatcaattacgcttaactaccgccgaaagttgcaccggcggtaagttggctagcgccctgtgtgcagctgaagatacacccaaattttacggtgcaggctttgttactttcaccgatcaggcaaagatgaaaatcctcagcgtaagccagcaatctcttgaacgatattctgcggtgagtgagaaagtggcagcagaaatggcaaccggtgccatagagcgtgcggatgctgatgtcagtattgccattaccggctacggcggaccggagggcggtgaagatggtacgccagcgggtaccgtctggtttgcgtggcatattaaaggccagaactacactgcggttatgcattttgctggcgactgcgaaacggtattagctttagcggtgaggtttgccctcgcccagctgctgcaattactgctataaccaggctggcctggcgatatctcaggccagccattggtggtgtttatatgttcaagccacgatgttgcagcatcggcataatcttaggtgccttaccgcgccattgtcgatacaggcgttccagatcttcgctgttacctctggaaaggatcgcctcgcgaaaacgcagcccattttcacgcgttaatccgccctgctcaacaaaccactgataaccatcatcggccaacatttgcgtccacagataagcgtaataacctgcagcatatccgccaccaaaaatatgggcgaaataactgctgcgatagcgtggcggtatagcaggaagatccatattttccgccaccagcgcccgcaattcaaaatcatcgacatcctgcattgcttcgttttcttccaggcaatgccagcgcatatcgagaagtgcggcgctaagcagttcgctcatctcataccctttgttgaacaggctggcattacgcattttctgttgcagttcgtcaggcattgctgccccgctctgataatgccgggcgtagcgagcgaatacctgcggatgcgttgcccagtgttcgttgatttggctcggaaattcgacaaaatcacgcggcgtgttggtgccggaaagcgtggcataacgctggcgggcaaaaaggccgtgcagcgtatgaccaaattcatggaataaggttatgacatcatcccagagtaacaacgcaggctcaccggcagcgggtttctgataattgcagacgttataaattaccggatgtgttttattaagcgtactttgctcaacaaaattgcccatccatgcaccgccgcttttactatcacgggcgaagaaatcaccgtaaaataacgccagccccacgccattatgatcaaaaatttcccacacacgaacgtcaggatggtagacaggaatatcaaaacgttcgacaaacttaataccgaagagctgattcgcggtccagaatacaccttcatttaacaccgtgtttaattcaaaatatggcttgagctgcgcctcatcaagatcaaatttctcccgccgtacctgttccgcataaaatgcccagtcccacggctgcgcgctaaacccgccctgctgcttatcgataaccgcctgtatggaggctaattcatcgctcgcacgttgacgcgccgctggaacaatttcccgcataaagttaagtgctgcttcaggtgtttttgccatctgatcggcgattttccatgcggcataatgaggaaaaccaagtagtgttgcctgttgtgcacggatctccaccagacgttgaatgatagcgcgggtatcattggcatcatttttttccgctcgcgtccagcccgcaataaacagtttttcacgcgtcgcacgatcgcgcatttcggcaagcgccggttgttgggtggtattcagcagcggaatcagccatttgttatccagacctttctcgcgagccgcctctgccgccagcgcaatctcttgctcactcattcctgccagctgcgcgatatcgttcacaaccagaccgccggatttatttgctgccagtaatcgctggttaaactggctggtcagggtcgcagcttctgtattcagtacttttaattttgctttatcagcttgcgcaagtttggctccggcaaggacaaaacgttgatgaatcacctccaccaggcggatggattcactatcaagccccagggattcacggcgctgccagacagcatctacccgcgcgaataattcaccgttcagatagatatcattagccagttccgccagttcagcggaaaactgctcgtcaagacgctgtaattcatcattggtatgcgccgcagtcatcgcaaaaaagacgctggtaacgcgggtaagtaattctccgctttgttccagtgccagaatagtattgttgaaatcaggcatttgcgggttaagcgcgatggcagcaatttctgcccgcttttgctgcattccctcatcgaatgccgggcgatagtgatgattggcaatttgatcaaaatggggagccagatacggcagtgtgctttgcacaaggaaaggattcattgttgtcattttcttctcctgaacgcgaggtgttccatagcgtaggcttactgataacggagtgcaatcttgcaatccagtattacccgctcttaagcatcccgtgctatgttattgacacacaaaagcgttgaggaacagtgagaagcgcagtgcccagccatcccgatactgctgctttcaccaaatccttagtgcttctttcgtgtttttctattgtcataatggttatctctaaaaaagaggtaagatgcgtactacttactcgccgttattggtattattcagaaaaagtgagtaagactttgcagcaatgtttttgatcctgttcaaataaactaatggcatcagcaacatgctggaaatcaaacgtatgggtaattaatttttctggtttaattaaccctttacttaaccagtcgataacgatcgggaatttatttgcatttaagcgactagagaaaatagagagttcttttccggtaattccttgctgaatcacttcagacggttcactggagaaccccatcaatacaatacgtgccgctggagaagccagcgttacggcctctttcaggatagaaggatgacaagccgcatcgataattaatgtcggcttgatgcctttttcagtgaaaatctcgccaagcggtgtctggctgttattaatcgcccagtcagccccgctctctttcgctttttccagtcgttcatcaatgcgatcggcaacaatcacatttttaacgttatagacgccttttaatacctgaacgatcgtcaggccgattggaccggcaccataaaccagaacggtatcattttcagtcggttgaccatgtccggttacgttagccgcaatggtaaaaggttcgatcattaccgcatattgatcggccactgcttcaggaattttccacgcattttttgccggaaccacggcatattcactgaaaccaccgtcagcgtgcacacctaatacagccagtgtcgtacaaacgttcggtttacctatagagcacggatagcaatgcccacagctgaccaccggatcgacagcaacacgttcaccgactctggcgctttccacgccttcacccactgcatcaatgacgccaaagaattcatgaccaatgacgcgcggatatttcgcaaaaggattatgcccacgataaatatggctatcactaccacaaattccggcaagtttcacttttactcgtacttcacccgcactcggggtgggtatttcacgttcgacaatcgccagttgattcggtttttcaattaatatgcttttcattatcttactccttaccagttccacagcgtgccatcttccagacgtgcgactggtagataagcaggttcatagggatatttcgccgccagcttttcatcgaattcgataccaagacccggtttgtctcccggatgcatatagccgttatcgaaagtccagttgtgcgggaagacttcgagcatttgttcggaataacccatgtattcctggacaccgaaattggggacccacagatcaaagtgcagcgccgcagccatgcagactggactcaaatcggaaggaccgtgactgccagtacgtacctgatacaggctagcaaaatcggcaatccggcgcataccggtaattccgcctgcatgggtcagcgtggtgcggatataatcgatgagttgctcttcaatcagttgtttgcagtcccagatgctgttgaagacttcacccactgcgatgggtgtgacggtatgttggcgaatgagacggaagcattcctggttttccgcaggcgtcgggtcttccatccagaacatgcgataatcttcaatgcttttaccaaagcgcgccgcttcaataggcgttaagcgatggtgcatgtcatgcagcaaatgttcattaaaaccaaacttgttacgtaccgcgtcaaacaatttcggcatgaaatcgaggtatttctccgtgctccacagctgctcttccggccactgtcctttggttgcgggttcataagccagacctttacctttgctcatgccgtaggtggttttcataccagggattccgcactgcacgcggatggctttgaatccaagctcttgatgacgggcataatcatccagagcttcatcaatactgtgaccggtggtatggcaataaaccatcaccccttcacgagacgcgccgccgagtaactggtaaagcggcatgttggcagctttggctttaatatcccacagcgccatatcaaccgcactaatggcgctcatcgtaaccggaccgcgacgccagtaagcacctttatagaaaaactgccagatatcttcgatacggtgcgcatcgcgaccaataagctgcggacaaaggtgatcctgcaaataagaggccacggaaagctcacgtccattgagggtggcatccccaaggcccgtaataccgtcctcagtggtgatttttaatgtgacgaaattacgccccggacaggtaacaaaaacttcagcctttacgatcttcatgttcgattccttgcatcgcttgtcgtgatgcatgaaatctacgcaactgagctactaccatacaagtataaagatcgaaaaaagccggagtgatcacaaaaaaaggcgtatatttgcgctgtgaatggttgacaaaagatgaaatagaataccttttgtcagctgacacttcctcttatcttattgataaaatggatttatgttcttacgtgcgcccccagcccgcaacaatgatcaacatgccgcaaagcgcaatcaacgcacccgtccagtcataaagagtcagtttcacgccatccacaacgcgcagccacatcaacgccgtgcagacataaacgccaccataagccgcgtaaacacgcccactcgccgctggatgcaacgttaacaaccagacaaacagcgccagactaatccccgccggaagcaacagccagatactggcgtttcgttttaaccacaaccagggcagaaagcatccaataatttcacacagcgcagtagcaaaaaatagtaacgttgttttaatcatctttgtctcttattgacatcatgtatagttatagggcgacataatatcatcaatataaacaccctcctggtacgttttgcgtccgcagtggatggtgtagaatcacctttaatcattcatacagggaatgaattatgaaaatcactctcagcaaacgaatcggcctgctcgctattctgctgccttgcgcactggcattgagcacaactgttcatgccgaaactaacaaactggtgattgagtctggcgacagtgcacaaagccgccagcacgccgctatggaaaaagagcaatggaatgacacgcgcaatctgcgccagaaagtgaataaacgcactgaaaaagagtgggataaagccgacgccgcttttgataaccgcgataaatgtgagcaaagcgccaacatcaatgcctactgggagcccaatactttgcgctgcctggaccgtcgaactggccgcgttattaccccctaacctgttattgatttaaggaatgtaaggacacgttatgccaagcgcccacagtgttaagctacgcccgctggagcgtgaagatttacgctatgtacatcaactcgacaataacgccagtgtgatgcgttactggtttgaggaaccctacgaagcctttgttgaactctctgatctgtatgataagcatattcacgatcagagcgaacggcgctttgtggtggaatgtgacggcgaaaaagccggtctggtggagctggtggaaattaaccatgttcatcgccgcgcagaatttcagataattatctccccggagtatcaggggaaaggtctggcaacccgtgccgccaaattagcaatggactatggctttaccgttctcaatctctataagctgtatctgatcgttgataaagagaatgaaaaagcgattcacatttaccgcaagcttggctttagcgttgaaggtgaattgatgcacgagttctttattaatggtcaatatcgtaatgccattcgcatgtgtatattccagcatcagtatctggcagagcacaaaacaccgggtcagactctcctgaagccgaccgcacaataacattaataataatcgatcgtatttttgatggtgtaaacccgttcgacggcgggttttactccttcatcaacaatgattagctgacagtccaccggattagcgtgactgtcatattcacagctctgttttacattaccaacccgttgattattcagtaaagtaaccgctgtgtaatctaattttttgatcggatccgtacttggcgtggcgctgacagataatgttttgtcgttacttttcgtggttttacccagcggataaccctgatcatcatagcgatattccatctgcatttgtttgctgctggctttaatcacgaagccattatcatcggtttcccaactcaccccggcagaaggtaattctgctagctggcattttccctgtaaacgtactctcttctccagcgtctcggcatcacggtaataattggcgtccagtaccagagcgaccacggtattattttccagatccagtaattcgagactatcaaaacagccttcttcgctcaaagtcccagaaacacgtttcgtcacttcaccttgctcatccattaatgtctgagtgaaatcttttaccggaccacgcagcggatcaaaatcgaattcattagagaaactggccatctcaggggtaaaactaagtgttacctctgtgcggtcacatcctgtgaggaatatcgcgagtaagcatggtagtaatttgtatttcacaacagtcaccagagagtagagatgattctcaatcatagtagcaaatacagtactttacacgttaaatgctatgcttaaagaagttatcttcgcgtaaggagcttatgatgaaactcagtacctgctgtgccgcgcttctgctcgccctcgccagtcccgcggtactcgccgcgccgggatcctgtgagcgcatacagagcgatataagtcagcgcattatcaataatggcgtacccgaaagcagcttcacgttaagtattgtacccaatgaccaggttgatcagcctgattcccaggtcgtcggccattgcgctaatgatacgcataaaattctctatacccgcaccaccagcggtaacgtctctgctcccgcgcagtctagccaggatggcgcgcctgccgaaccgcagtaacacattatcgactgaacgccggatatgacaaatccggcgatttgaacatacaacataatcccaccttattactcatacccttctattgatatggattaataattcttaacccaaaatgggtagactccctctattgttagcgcgctaaatattcaatatataaacttttatataacgataaagaacagggagtgagttatgtccaaaaatgaacgaatggtgggcatcagccgcagaacactcgttaaatctaccgcgataggttctctggcgctggctgcaggcggtttttctttgccgtttaccctgcgcaatgcagcagcagcggtacaacaggcccgcgaaaaagtggtctggggtgcctgttccgtcaactgtggtagccgctgtgcacttcgtctacatgttaaagataatgaagtgacctgggtggaaactgacaataccggcagcgatgagtacggcaaccatcaggtacgcgcctgtttgcgcggtcgctccatccgccggcgtattaatcatcccgatcgcttgaattacccaatgaaacgcgtgggcaaacgcggcgaaggcaaattcgaacggattagctgggatgaagccctggatactatcgccagtagcctgaagaaaaccgtcgaacaatatggcaatgaggctgtatatattcagtactctagcgggatcgttggcggcaatatgacccgctctagcccaagtgccagcgcggtcaaacgcctgatgaactgctacggcggtagtctcaaccagtatggctcctacagcactgcgcaaatttcctgtgccatgccctacacctacggcagtaatgatggcaacagcaccacggatattgaaaacagcaagctggtcgtgatgtttggtaacaacccggcagaaacccgcatgagcggtggtggcatcacttatcttcttgaaaaagcgcgcgagaaaagcaacgccaaaatgattgttatcgatccgcgatataccgatacggctgccggtcgtgaagacgaatggctccctattcgcccgggcaccgatgccgcgctggttgcgggtattgcctgggtattgattaacgaaaatctcgttgatcaaccttttctcgataaatactgcgtcggctatgacgaaaaaaccttacccgcagatgcacccaaaaatggtcactataaagcctatattcttggtgaaggtgacgataaaacagcgaaaacgccgcagtgggctagccaaattaccggtatcccggaggaccgtatcatcaaactggcgcgtgaaattggcacagcaaaacccgcttatatctgccagggctgggggccacaacgccaggcaaacggcgaactgactgcacgcgctattgctatgttacctattttgacgggcaatgtcggcatcagcggcggaaatagtggcgcgcgtgaaagcacctataccattaccatagaacgcctgccggtgctggataatccggtcaaaacgagtatctcctgcttcagctggacagatgctatcgatcatggtccgcaaatgacggcaatccgcgacggcgtccgcggcaaagataaactggatgtgcccattaagttcatctggaactacgcgggaaataccctcgttaatcagcattctgacatcaacaaaacgcatgaaattctgcaggacgaaagcaaatgcgaaatgattgtggtcatcgaaaactttatgaccagtagcgcaaaatatgccgacattctgctgccagacctgatgaccgttgagcaggaagatattattcctaacgactacgccggtaacatgggatatctcattttcctccagcctgtcaccagcgaaaaattcgaacgcaaaccgatttactggatcctgagtgaagtcgcgaaacgtcttggacctgacgtctatcaaaagttcacagaaggtcgcacgcaggaacaatggttacaacatctgtacgccaaaatgcttgccaaagatccggcgttaccgtcttacgacgaactgaaaaaaatgggtatctataagcgtaaagatcccaatggccattttgtcgcctacaaagcatttcgtgacgaccccgaggcaaatccacttaaaacgccttccggtaagattgaaatttattccagcaggctggcggaaattgcccgtacctgggaactggaaaaagatgaagtgataagcccattgccagtttatgccagtacctttgaaggctggaactcccctgaacgtagaaccttcccactgcaactgtttggtttccattacaaatcccgtactcacagcacctacggcaatattgatctcctgaaggctgcctgccgtcaggaggtgtggatcaaccctatagatgcgcagaaacgtgggattgccaacggcgatatggtgcgggtgtttaaccatcgtggcgaagttcggctaccagccaaagtaacaccacgtattctccctggagttagcgctatgggccagggagcctggcacgaggccaatatgtctggcgataaaatcgaccatggcggctgtgtgaatacgctaaccactctgcgccctagtccactggcgaagggaaacccgcagcacactaatctggtcgagatcgaaaaaatataacccacgacaaccataaattctggcatgacattttgtttgaaaagcaataagtgagtaatgatgaaaatccataccacagaggcgctcatgaaggctgaaatcagccgtagaagtctgatgaaaacctccgcacttggcagtcttgcgctggcaagcagtgctttcactctgccattttcccaaatggtccgggcggcagaggctccggtagaagagaaagcggtctggagttcctgcaccgttaactgcgggagccgctgtctgttacgtttgcatgtgaaagatgacaccgtgtactgggtggagtctgatacgacaggtgacgacgtctacggtaatcatcaggttcgagcgtgtttacgcgggcgctctatccgccgacggatgaatcatcctgataggttgaaatatcccatgaagcgcgtcggcaagcgcggtgaaggtaaatttgaacggataagttgggacgaagccctggataccatcagtgataatcttcggcggatcctgaaagattacggcaatgaggctgtacatgtcctgtacggaacaggcgtagatggcggaaacatcaccaacagtaacgtcccgtaccgtctgatgaactcttgcggtggttttctcagtcgctatggcagctacagtaccgcacagatcagtgccgcaatgagttatatgttcggtgccaatgatggcaacagcccggatgatatcgccaatacgaaactggtcgttatgttcggaaataacccggcagaaacgcggatgagcggcggtggtgtcacttactacgtcgagcaagcccgcgaacgtagtaacgcacgcatgatcgtcatcgatccacgttataacgacactgctgccgggcgtgaagatgaatggctgcccattcgccctggcaccgatggcgcactggcctgtgcgattgcctgggtactgattactgaaaacatggtcgatcagccatttctcgacaaatattgtgttggttacgatgaaaaaacgctgcccgccaacgcaccacgtaacgcgcattataaagcctatattctgggcgaagggcctgacggcatagctaaaacgccggaatgggcagcaaaaatcaccagcatcccggcagaaaaaattatccagttggcacgagagatcggtagtgcaaaacctgcttatatttgtcagggttgggggccacaacgacattccaacggcgagcaaacatcccgcgctattgccatgctttccgttctcaccggcaacgtcggcataaacggcggcaacagtggcgtacgcgaaggtagctgggatctgggggtagaatggttcccgatgctcgagaatcctgttaaaacgcagatttccgtctttacatggacagatgccatcgaccatggtacggaaatgaccgcgacccgtgatggtgttcgtggaaaagaaaaactggatgtccccatcaagtttttatggtgctacgccagtaacacattgatcaatcaacatggcgacatcaatcacacccatgaggtgcttcaggatgacagcaagtgcgagatgattgttggcattgaccacttcatgacggccagcgctaagtattgcgatatcctgttgcccgacctgatgccaacagagcaagaagaccttatctctcatgaatctgcagggaatatgggctatgtgatcctcgcccaacccgcaaccagtgcaaaatttgaacgcaaacccatctactggatgctgagtgaagtcgccaaacgcttaggaccagacgtttatcaaacctttactgaaggtcgcagtcagcatgaatggatcaaatatctccatgcgaaaacgaaggaacgtaaccctgagatgcccgactacgaggagatgaaaacgaccgggatctttaagaaaaaatgcccggaagaacactacgtcgctttccgcgcattccgtgaagatccacaggcaaacccgttgaaaacacctagcgggaaaatcgaaatttattctgaacgactggcgaagattgcagatacctgggaattgaaaaaagatgaaattattcatccccttcctgcgtataccccaggttttgatggctgggacgatcccctgcggaaaacctatccactgcagttaacgggcttccattacaaagcgcgtacccactccagctacggcaatattgatgtgttacagcaggcctgcccacaagaggtgtggatcaaccccattgatgctcaggcacgcggtatccgtcatggcgataccgtgcgggtatttaacaataatggagaaatgctgattgccgcaaaagtgactccgcgtattctgcctggcgttaccgccatcgggcaaggtgcgtggcttaaagcggatatgtttggtgaccgggtcgatcacggcggcagtatcaatattctgacctctcaccgccctagtccgctggcaaagggaaacccgagccacagcaatcttgtccagatcgaaaaggtttaaggagtagcccatgaccacacaatatggattttttatcgattccagccgctgtactggctgtaaaacctgcgaactggcgtgcaaagattttaaagatcttggcccggaagtcagtttccgccgtatttatgaatacgctggcggcgactggcaggaagataatggcgtctggcaccagaacgtgttcgcttattatctctccatctcctgtaaccattgcgatgaccccgcatgtacaaaagtctgccccagcggcgcaatgcataagcgtgaagatggctttgtggtggttgatgaagatgtttgtatcggctgccgctactgccacatggcttgtccgtacggcgcgccacagtacaatgctgaaaaagggcacatgacgaagtgcgatggttgttatagccgcgtcgccgaggggaaacaacccatatgtgtcgaatcctgcccgctgcgtgcacttgagttcggtccaattgaagagctgcgccagaagcacggcactcttgctgccgtcgcgccactgccgcgcgcgcatttcacaaaacccaatatcgttatcaaacctaacgccaacagccgcccgaccggcgataccactggttatctggctaatccggaggaagtgtaaaatgggaaatggatggcatgagtggccactggttatctttaccgtattgggtcaatgcgtagtaggcgcgctgattgttagcggaattggctggttcgccgccaaaaatgacgcagaccgtcagcgtattgtccgtggcatgtttttcctctggctgttgatgggcgtcgggtttattgcctctgtcatgcacctgggaagcccactgcgggcgtttaactccctgaatcgaatcggagcttctggtctgagtaacgagattgctgccggttccatattttttgccgttggcggattatggtggctggtggcagtcatcggtaaaatgccgcaagcgttggggaaactctggttacttttcagcatggcgctcggcgtcattttcgtctggatgatgacctgcgtgtatcaaatcgacaccgtgccaacctggcataacggttacactacgctggctttcttcctgacggtattgttgagcggtccaatacttgctgccgcaattctgcgggcagctcgcgttacatttaataccacaccatttgccatcattagcgttctggcgctgatcgcttgtgccggggtgattgtgctgcaaggtttgtctctggcgtctattcacagttccgtgcaacaagccagcgcactggtaccagattacgcctccttacaggtctggcgtgtggtattgttatgcgcaggtcttggatgctggctttgcccgctcattcgtcgccgtgaacctcacgttgccggacttattctggggctaatcctcatacttggcggtgagatgatcgggcgtgtgctcttttatggcctgcacatgacagtaggaatggctattgcaggttaacaaattggtgcggggcaacccgcacatttcaggatgttaggaatgacccattttagtcagcaagataatttttctgtcgcggcgcgcgtgttgggcgcgctgttttattacgctccagagagtgcggaagccgcacctctggttgcggtactcaccagtgacggctgggaaactcagtggcctctaccagaagcgagtttagcgccgctggtgacggcttttcagacacagtgtgaagagactcacgcccaggcctggcagcgtttgtttgtcggcccgtgggcactgccgtctccgccgtgggggagcgtctggctggatcgcgaatctgtgctgtttggcgatagtacattggcacttcgtcagtggatgcgcgagaaaggcattcagtttgaaatgaagcaaaacgaaccggaagatcattttggtagtctgctgttgatggctgcgtggttggcggagaatggtcgccagacagaatgcgaagaattgctggcatggcacctttttccgtggagtacacgttttcttgatgtttttatcgaaaaagcagaacaccctttctaccgtgcactgggtgaactggctcgcttaacgctggcgcaatggcaaagtcaactgttaattcctgtcgcggttaaaccgctgtttcgataagatcaccgtaatattgccggatggtgacgattacgcgcaatccggcaataataggttacagtgtcacgtttttttatctcttaaagcacgcactgcttttgcggctggcctcttttgccgcaaaatagtcgcccgtgtttcattgcccatttctgctcatgcatcatctacacatctatccggatctgcgcactatgttccaccgtctgcttatcgcaacagtcgtcggtattctcgcggcctttgccgttgccgggtttcgtcatgcgatgctgctactggagtggttgttcctcaataatgactccggcagtctggtcaatgcagcgacaaacctttccccctggcgacggttgctaactccggcgctcggcggactggcggcgggtttgttgctgatgggctggcagaaatttacccaacaacgccctcatgcgccgaccgattatatggaagcgttgcaaaccgatggacagttcgattacgcagcaagcctggttaaaagccttgcctctctgctggtagtaaccagcggcagtgcaattggtcgcgaaggtgcgatgattcttttagctgcccttgccgcctcctgttttgcccaacgttttacgccacgccaggagtggaaattatggatcgcctgtggggccgcggcgggaatggctgcggcctatcgtgccccgcttgctggcagtttatttatagccgaagtgctgtttggcactatgatgttggcctctctcggcccggtgattatttccgccgtcgtggcattgctggttagcaatctgattaatcatagcgacgcgttactctacaacgtacaactcagtgtgacggttcaggctcgtgactatgcgctgattatcagtacaggtgtgctggcaggtctgtgcggaccactgttgttaacgttaatgaacgcctgtcatcgtggatttgtgagtctcaaacttgcgccgccctggcaactggcactaggcgggttgatcgtgggtctgctttccctgttcacacctgcagtgtggggcaacggctatagcaccgtacaatcctttttaaccgccccaccactgttaatgatcattgccgggatcttcctttgtaaactgtgtgccgtgctggcgagtagcggttccggcgcacccggtggggtctttacaccgacgctatttatcggtcttgccattggcatgttgtatggtcgtagcctgggattatggttccctgatggcgaagaaattacacttttactcggattgaccgggatggcgacactgttggcggcgaccacgcacgcgccgattatgagcacgttgatgatatgtgaaatgaccggggagtatcagctactccccggtttattgattgcctgcgtaattgcgagcgtaattagccggacgttacaccgtgactctatctaccgccagcacactgcgcagcatagctaagcggatgtattgccccagttcacgctgttcggcgcgcggcagataaggcagttcaccaatgagcggtgccggaagttttttacccagcacatcaatgatttccgcataatgcgccagtcctgggttgattcggttagccacccagccaatgagcggcagcccgtcgttggcgatcgcctgagctgttagcagtgcatggttaatgcaaccttcctgaataccgacaaccatcaacaccggcagttgttcctgcactacccattcagagagtggacgcaaatcattcatcagactgcgccagccgccagtcccttctaccacgacatgatcgactttttcggtcaggtttgccaggccgttactaatgagggtgtaattgattgggcaactgtgcgccacgctactttcttcttcgcttaacgcgataggattaactgcttcataaggcagttcgatggtactaacactctgcaacaccagggcatctttattacgcagcccttcgggtgtctctttgctccccttcgctacgggtttatatcccgcaaccgtttttccctgggaggctaacgcttgtagcaatgcgcgggaaaccaccgttttccctacagaagtgtctgtaccggtaataaagaaacgcttcagcatcactaactccaccgttatgcttcacaaatataaaccaggaaaataattaaccttgaaagtctaagttatgctttcctggcccaaattgagatagcgcaaattttggtagaacagttaaaaaatgttaaccctgcaacagacgaatcaacaaagaaccgttatacatcgcgtcttttaccagtgcagcgcctgccatcgtgccctggttagaaaactgagtactctcaacgctgatgtgctgactatacgcaggaagggcctgctgacggatgctgtcactgatgaccgggaagaggatatctgccgctttacttaacggactgccaatcagtattttttgtgggttaaataaattcaccatgatggcaagaatgcgcccgacatgcgcgcccaccccggtaatgatgtcttttgccagtagatcgccgcgcaatgccgcctgacacaaactgtccacggttaacggttgtccatgtaacatgctgctcatggattgattaagacgcagctgtgccagctcaagaatactgtccacgctggcgatggtttcgaggcagccgtgattcccgcaataacagcgtttcccatacgggtcgacctgtgtgtggcctatttccacgagactactgctgcctgcgtgtagcagatgaccatcggtaatgacgcccgcccccacgttgtgatcgataaccacctgaatcacatcgcgcgccccgcgactggcaccaaacaaggcctctgccatcgtccatgcgctgatatcatgctgaatataaaccggaacgccggtatgctgctccagcgcctcgccgagcggcatctcttttacatcctcgtagaacggcatgcgatgtacaataccattttccgtatcaataattcccggcaaggttatggcaatgctagttagacgctcaagttttttctggtggcggataaaaaactgatcgatatgggaaataatacgatccagcaatggcaagtcatcttttaacgccagttcctggctctcttccaccaccagtttgctgctcagatcgcgcagagcaaggaaaatctccccgcgactaatgcgcagagaaagatagtgccaggcttcagtttcaaccaccagccccaccgccggacggccacggttccccgcttctttgatttccagctcttgcaccaggtgtgcttcgagcatctcacggacaattttagtgatactggcaggagccagttgcgccagacgggaaagatcgatacggctgactggaccaagctgatcaatcaggcgataaaccgcgcccgcgttggtctgctttatttgatcaatgtgcccaggctggttttcagcaaccaccgcatactccctatattttcgcgctccgaaataatctgtaggctatggtgaagcacttcaatacgtgtcgtcaaatttttacttaggcatgtgattaacagcacatttttcgggctttttcgctgaaatttccctcacctgagagcattcagcagatgaatacgaaagttacgcgcagccggactttgttcatgatgtttcggccagaccaaccacatttcagaaaccgcatcctcttcagcaatcggcacccagcgcatttcgttgagctgaacacgtttaaaactcgcaggcaaaatactaacacccagaccggcggaaaccagaccgatgatggtcattgcctcgcccacctcctgagtgatgacgggcgtcaaatggtaacgtcgcatcagcccgagaatatcgtcatacagccctgtcccgacgtgcggatcaaaaaagacaaagggttctttcgccagttcagccagcgttacattcgggttatttgccaggggatgatcgtgcgggatcatcgccataagcggttcatggacgatgactgcgtgttcaaggctctccggtaacgctgtgttacgcagcaatcccatatccagcgttccttcaatgagcggagcgatttgctcgcgagtgttcatttcgcgggtttgtaaatggacatcaggataatcacggcgaaacaggcttaacgtatcggacaccgcccgaataaaaggagcgctgctagtaaaaccaatgcgcaactcccccgcttcaccctgatgcagcctttcagcgcgagcggcagcgtcatccaccatagacaggatttgccgactatctgcaagaaactgttttcctgctgccgtcagcaatacactgcgattggttcgtgccagcagtcgggcaccaatttgttgctccagcgcctgaatctgctgacttagcggcggttggctaatattcaggcgggcagcggcgcgcccgaaatgcagctcttccgcaacagcaacaaagtaacgcagatgacgaagttcaatattcatatttaaaacatcttatttgagattattaatatattagacagaacaattcgattttcctaccctatgtataagcctgatctacaggcatatttagcaaggatttcaagtgagccgtactacaactgttgatggcgctccggcaagcgacactgacaagcaaagcatttctcagccaaatcaatttattaaacgcggtacgccgcaatttatgcgcgtcaccctggcgctgttctctgccggactggcaacatttgcacttctctattgtgtgcagcctatccttccggtgcttagccaggagtttggcttaacccccgcgaacagtagtattagtctgtccatttccacggcgatgttggctattggtttgctgtttactggcccgctatccgatgccattggtcgcaaaccagtgatggtcacggcgctactgttggcctccatttgtacgttacttagcacaatgatgaccagctggcacggcattttgattatgcgcgccttgattgggcttagcttaagtggcgtggcagctgttggcatgacttatcttagcgaggaaatccatcccagtttcgtggcctttagtatggggttgtatatcagcggcaacagtattggcggcatgagcggacgcttaattagcggtgtcttcacggactttttcaactggcgaattgctctggcggcaatcggttgtttcgcgctggccagcgcgttgatgttctggaaaatcctccctgaaagtcgccattttcgcccgactagcctgcgccctaagacgttgtttatcaactttcgtctgcactggcgtgaccggggattaccgttattgttcgcagaaggctttttgctgatggggagcttcgtcacgctgtttaattacatcggctatcggttgatgctctccccctggcatgtcagtcaggccgtggttggcttattaagcctggcttatttgaccggtacatggagcagtcccaaagccggaaccatgaccacccgctatgggcgtggtccagtgatgttgtttagcacgggggttatgctgtttggtttactgatgaccttattcagcagcctgtggctgatctttgccggaatgttactcttcagtgcaggattcttcgcagcccacagtgtagccagcagctggatcggcccccgcgcaaaacgcgctaaaggccaggcctccagcctgtatctgttcagttactatctggggagcagtattgccgggacgctgggtggtgttttctggcataactatggctggaacggcgtcggcgcatttattgctctgatgctggtcattgctctgctggtcgggacgcgtttgcatcgtcgtctgcacgcctgaaaaataagtccggactgcggtaaatacccgtccggacttattgccagctcaaaccaacgttaatagccatcctaaaatagacgaagcgccagccaattcccgcagcgcgtctagcgtcatcaggattataagtacccaaataaacggattcattttgctgtgtgtcatttattactgatgcgcagttattctactgctttgtaagtagtaaaatagttaacccgatcaagactactattattggtagctaaatttcccttaagtcacaatacgttattatcaacgctgtaatttattcagcgtttgtacatatcgttacacgctgaaaccaaccactcacggaagtctgccattcccagggatatagttatttcaacggccccgcagtggggttaaatgaaaaaacaaattgagggtatgacaatgaaaaaagtattagctctggttgttgccgctgctatgggtctgtcttctgccgcctttgctgcagagactacgaccacacctgctccgactgcgacgaccaccaaagcagcgccggcgaaaactacacatcataaaaaacagcataaagcagcacctgcccagaaagcgcaggcggctaaaaagcatcataaaaatacgaaagctgaacagaaagcccctgaacaaaaagcgcaggcagcgaagaaacacgccaagaaacacagccatcagcaaccggcaaaacctgctgcacaacccgcagcgtaagttttcaacagtaatgctggcgcgccccctcgcgcctgaaaattacggtgctaagcgggtaacgtttagcaccgcctttagcggagggtagtatggtgggccgttatcgctttgagttcattctgatcatccttattttatgcgcactgattaccgcccgtttttatctttcctgattgtagttatctgattttactcccactttcatcccgtcccgtctatagtatttatgagggtttgcttttaataatcataattacccaccagagtgtgatatgcgtacaaccattgctgtagtgttgggtgcaattagtttgacgtctgcttttgtgtttgcagataaaccagacgttgccagaagcgcaaacgatgaggtcagcaccctgttttttggtcatgatgatcgtgtgccagtgaatgacacgacccaaagtccgtgggatgcggttgggcaactggaaacggccagcggcaatttatgtacggcgacgctgattgcacccaatctggcattaacggcaggacactgtttattgacacctccaaagggtaaagccgataaagcagtggcgctgcgttttgtgagtaataaaggtctttggcgctatgagatccacgacatagaaggccgcgttgatccgacactgggaaagcggttaaaagcagatggggatggttggattgtacctcccgcagccgcgccgtgggacttcggattgattgtgctacgtaatcccccttctggcattacgccgttgccgttatttgagggagataaagccgcgcttaccgccgcattaaaagcggcaggtcgtaaagtgactcaggcaggctaccctgaagatcatctcgatacgttgtacagtcatcaaaactgtgaagtgactggctgggcgcaaacgagcgtgatgagtcatcagtgcgataccttgccgggtgacagcggtagccctctgatgttgcataccgatgacggctggcaattaattggggtgcaaagtagcgctcctgccgcgaaagatcgctggcgcgccgataaccgggccatttctgttaccggttttcgcgacaagctggatcaactgagccaaaaataatgttcaaacgctgcccgacagcgcgggcagcgtcttcatcaggcaagtttcaccatgatcattccagccaacagcaagaccaggccaatccagcctttacgatttaaccgttgaccaaacaagatccaacctgcggctaacgtggcggcaataccaaacccgccccacaatgcataagcgacagacaagtcgatccctttaacggcttgagaaagcgcactaaaggcagccagcaccgccgccagggagagcaagccaaatattttgcgacgaaagccgtcagaaaatttcaaaaagacgttagcaacgatttccagcacgattgccaatgccagccaggcggcgtgaacccattcaaactgcgccatggttcacctccagttcaggtttacgcgctttacgggtaccactttttatcaacacaatcccggcgaccagggtggttaacccggcaattttcatcaggcttaaactttcgtcgaataacaaaacgctaaacaaggtaataaataaaataccgataccttcccacagcgcataagctacgcctaaggcgatttttttaacggcgaaagagagaaatatatagctcagagaaatcatcaccagcattaaaataaagccgccatttccctcactgacgctcgcccatttcatactcagcgtaccggtaatttctgtagcaatagccagacctaataaaatccaataaatatacattgtccttctcctgcaagagaattattttaattttcgcttaattcagcgaaaccaaagtaaagtggtcaagccccgcgcatagcgcaagctttggcagaagaaaggactaaagcgcgttgcgccagtgctgctcacctacgagcaagatagtggatgaggtacgaagatgggtaaatgtagaaaataacgtcctgaacaaattgtccataatattacaattatccgcagtgttgcttctcgtcatcgcggatgataattgtcctcggtagttgaacacgcctgatttgtatcatagcttaagaattaactcaaaatattttcacttctttacctgagcggtttgattttcgttatgatgacggagcgaaaaagacattattattagcaaaggaagaaaaaacggggacaagcatggcaaagccgatcatcacgctcaatggcctaaaaatcgtcattatgttgggaatgctggtcattattctctgcggtatccgttttgccgccgagatcatcgtgccgtttattctcgcattatttattgctgttattcttaacccgctggtgcaacacatggtccgctggcgtgtgccgcgtgtactggcggtgagcattttgatgaccatcatcgtgatggcgatggtgttgctattagcttatctgggttccgcgctcaacgagttgacgcggacgttaccgcaatatcgcaactctattatgacgccgctgcaagcgcttgaaccgttgttgcaacgcgtagggattgacgtcagtgttgaccagctggcgcattatattgatccgaacgcggcgatgacgttgctcaccaacttattgacgcagttatctaatgccatgagtagtatatttttattgctgctgacggtgctgtttatgctgctcgaagtgccacaattgcccggaaaatttcagcaaatgatggcgcgtccggttgaagggatggcggcgattcaacgtgcgattgacagtgtttctcattatctggtgctgaaaacagccatcagcatcatcaccggcctggtcgcctgggcgatgctcgccgcactcgatgttcgcttcgcttttgtctggggattgctggcctttgcgcttaattacatcccgaatattggtagtgtcctcgcggcaatcccccctatcgctcaggtactggtgtttaatggcttctacgaagcgttgctggtgctggcgggatatctgctgattaatctggtcttcggcaatattctggagccgcgtatcatggggcgtgggctggggctttccacattggtggtatttttgagcttgattttttggggatggttgttaggaccggtgggtatgctgctttccgtgccgttgacaattattgtcaaaattgcgcttgaacaaacagcgggaggtcaaagcatcgccgttctgttaagcgatctcaataaagagtgacggcctcagcagaggccgtcagggttacagagctttcaggattgcatccacgctggctttggcgtcaccaaacagcatgtgggtgttttccttgaagaacagcgggttttgcacaccagcatagccagtgttcatgctacgtttaaagacaatcacgttctgcgctttccacacttccagcacaggcataccagcaatcggactcttcggatcatcctgcgccgccgggttaaccgtatcgttagcaccaatcaccagtacggtatcggtatcagcaaagtcatcattgatctcgtccatttccagcacgatgtcatacggtacttttgcttcagccagcaatacgttcatatgtccaggcaaacgccccgcgaccgggtggataccgaaacgcacattaataccacgagcgcgcaatttctcagtaatttcagcgacaggatattgcgcctgcgcgactgccatgccgtaccccggagtaatgatcacactatgggagtttttcagcagttccgctgtctcttctgcggtgatttcgcggtgctcacccacttcctgatcatcgccagtagaagagccgtcggtgccgaaaccacccgcaataacgctgataaaggaacggttcatcgccttacacataatgtaagaaaggatagccccgctagaaccgaccagcgcaccggtcacaatcagcaggtcgttgctgagcataaagcccgcagccgcagccgcccagccggagtagctgttcagcatgctcaccaccactggcatatctgcaccaccgatggaggcgactaaatgccagccgaataccagcgcaattgcggtcattatcagcaatgccagcacttgcaggccgacgctgtccgtgcgaacaaatacaatcagcagcaggaaggaaacgaccagagccgccaggttcattttgtgacggtttggcagcatcaatggtttagagctaatcttgccacacagtttgccgaacgccaccacgctacccgtgaacgttaccgccccgatgaagataccgaggaacacttccgtcaggtgaatattgaccagaatcggtgccattcccgcgtcatgatgcagatagctgttaaagccaaccagcactgccgccagacccacgaagctatgcaggatcgccaccagttctggcatttcggtcatttcaactttcttcgccagacggataccaattgccccaccaatgaccatcgccagcaagatccagccaacattacccgtatccggtccaaaaatggttgcgattaacgcaatcgccatcccggcgataccgaagttgttaccctggcgagacgtttcatgtttgctaagaccggccagactgaagataaacaggatcgcggcaacaatgtatgcagctgtaactaatcctccagacatatgttaccccttaatttttgcggaacattttcagcatgcgctgagtcacggtgaagccaccgaaaatattaatgctggctataagcaccgcgataaaactaaggaagctaacccagccgccctggccaatctgcaacagtgctccgacaacaataatcccactaatcgcgttggtgacgctcatcaacggtgtatgcagcgcgtggcttacattccacaccacgtaataaccgacaacgcaggccagcgcgaaaacggtgaagtgcccaaggaattctttcggcgcaacgcttgccatccagccaaaaagaatgattgccagcgccatcaacgcgtatttacgccacggactgcaggtacatttttcctcagttttcacttccggtgccgctttttgtgccgcctgcggctgagcacttacctgaatcggcggtgccggccaggtaatttcgcccgcacggatcacggtcacgccgcgaatcaccacatcatcaaaatcaacagtgatattgccgtctttctctttgcacaacagtttcagcagattaacgaggtttgtgccgtaaagctgactggattgcgtcggcagacggcccggaagatcggtataaccaatcactttgacaccattttccgtagtgaagatttcacccggcacggtgtattcacagttgccgccgttttgggctgccaggtcgacaatcacactgcccgccttcatggagtcaaccatttcacgggtaattagcttcggcgctggtttgcctggaataagcgcggtggtgacaatgatatcgacctcttttgcctgggcggcaaagagttccatttccgctttgatgaacgcgtcgctcatcactttggcatagccatcgccgctgccagcttcctctttaaaatccagctcgaggaattccgcgcccatactttgaacttgttctttcacttccgggcgggtgtcgaatgcacgcacaatcgcgccgagactgtttgctgcgccaatggcggccagacctgcaacacccgcaccaatcaccatcacttttgccggtggcactttcccggccgcagtaatttgcccggtaaagaagcgcccaaattcatgtgccgcttcaacaatggcgcgataaccggcgatgttcgccatgctgcttagtgcgtccaggctttgtgcgcgactgatacgcggcacagagtccatcgccatcacggtcacgttacgttccgcaagtttttgcattaattccggattctgcgcaggccagataaaactcaccagcgttgtcccaggattcagtaacgcaatttcatcatctaacggcgcattgaccttcagaatgatctcactctgccagacgctattcccttctacaatttcagcgcccgcttgcacaaacgctttatcgtcaaaacttgccagttgacccgcgccgctctctaccgcgacggtaaaacccagtttcagcagctgttccactgtttttggcgttgctgcaacacgggtttcattggttaaccgttctcttggtatgccaattcgcatgatattcccttccatcggttttattgatgatggtttgcctgtgtcaggagccacacaagctgctcatgtacgagctaaatgttactccgttaaaataaattagtaacaaacgccctataacgtactgaaaattatgcctgtgatctagcgccaaaaatcagtatttcggcgtgaactcgcaaaatattaacgattcagccgtgatagtgggataaacaccttagaacgccggataaagactgataattgtcttcgacggtcgggtaaaacgagacatcgccccggcacgaatcactacttaacattaaattaacttatacaattcagttgcttcagtagtaatgatgctgatacggctgttttttaagcatagacggtcatttgagcaggattaaaattggcttaaggaatgtgatatgaaaaatgacgcagacagttacaccgtttaaatgcaataatcagccacgtttctcgttaataacaataccagtacctggtttgcgcaaggcgaaggattatttttatgaagcttaagaacaccctcctggcgagcgcactgctttctgctatggcattctccgttaacgcagcaacagaactgacaccggagcaagcggcagcggttaaaccttttgaccgtatagtggttaccggtcgttttaatgctattggcgaagcggtgaaagccgtttctcgtcgcgcagataaagaaggtgccgcctctttttatgttgtcgacacttctgattttggtaacagcggtaactggcgtgtggtcgctgacctctataaagccgatgctgaaaaagcagaagaaacaagtaatcgcgtaattaacggtgttgtcgaactgccgaaagatcaggctgttctgattgaaccgtttgacacggtcaccgtccagggcttctatcgtagccagccagaagtcaatgatgccatcaccaaagcggcaaaagcgaaaggtgcctactctttctacatcgttcgtcaaatcgatgccaaccagggcggcaaccagcgtattactgcattcatctataaaaaagatgctaagaaacgtatcgtccagagcccggatgtgatcccggcagattccgaagcaggacgtgcagctctggctgccggtggcgaagccgcgaagaaagttgagatcccgggtgttgcgactaccgcaagtccaagttctgaagtcggtcgcttctttgaaacccagagtagtaaaggcgggcgttacaccgtcacgctcccggatggcactaaagtcgaagaactgaacaaagcgaccgcagcgatgatggtcccgttcgacagcatcaaattctctggcaactacggcaacatgaccgaagtctcctatcaggttgcgaaacgtgccgcgaagaaaggtgctaagtattaccacatcacccgccagtggcaggaacgtggtaataacctgaccgtcagcgcagatctgtataaataactattcagttactcctataaggcggcttgatgccgcctttcgcatttttagtcacaaatttccccgcgaccattgcatgcagacacatctcttcgtaaaatcccgcgcttcagtggcaaactccatttttatgcgttttgccctaatatttattcttcttatcacgttttaatcactggatatcgatggaaaagaaactgggactgagcgcactcaccgcgctggtattaagcagtatgctgggcgcgggtgttttcagtctgccgcaaaatatggcggcagttgccagcccggcagcactgctcatcggctggggtattactggcgctggcattttattgctggcctttgccatgctgatcctcacgcgcattcgtcccgaacttgacggcggtatctttacctatgcccgcgaagggtttggcgagctaatcggcttttgttccgcatggggatactggctgtgcgcagtcatcgccaacgtctcctatctggtgatcgttttttccgcgttaagcttttttacggacacgccggaattgcgcctgtttggcgatggtaatacctggcaaagcatagtcggtgcaagcgctttattgtggattgttcactttttgatcctgcgcggggtgcaaaccgctgccagcattaacctggtggcgacactggcaaaattgttgccgctgggtctgtttgttgtgctggcgatgatgatgttcaaactggataccttcaagctcgacttcaccggacttgcacttggcgtacccgtttgggaacaggtgaaaaacaccatgctgatcaccctgtgggttttcattggtgtggaaggtgccgtggttgtttctgcgcgtgcgcgtaataaacgtgatgttggcaaagcgacactgctggcggttctctccgctctgggcgtttacttgctggtaacgctgcttagcctgggtgtggtggcacgtcctgaactggctgaaattcgtaacccgagtatggccggtctgatggtggaaatgatgggaccatggggcgaaatcatcatcgctgccggtttgatcgtttccgtttgcggcgcgtacttaagctggaccatcatggcagcagaagtaccgttcctggccgccactcataaagcattcccgcgcatttttgcgcgccagaacgcacaagctgcgccatccgccagtctgtggttgaccaacatctgcgtgcaaatttgtctggtactcatctggctgaccggttccgattacaacacgttgctgaccatcgccagtgaaatgattctggtgccctatttcctggtcggcgcgttcttgctgaaaatcgcaacccgtccactgcataaagcggtaggtgtcggtgcctgcatttatggcttatggttattgtacgcctctggtccaatgcacttgctgttatccgttgttctgtatgcaccggggctgctggttttcctgtacgcgcgcaaaacgcatacccatgataatgtactgaaccgtcaggaaatggtgctgattggcatgctgttaattgccagtgttccggcgacctggatgctggtgggataacgttcatcccatcgttggatagcaaaggagataacgatgggtaaaacccagcccttgccaatattaattactggcggaggtcgtcgcatcggcctcgccctcgcatggcatttcattaatcaaaagcaaccggtgattgtcagctatcggacacactatccagccattgatggactgattaatgcaggtgcgcagtgtattcaggctgattttagcaccaacgacggtgtgatggcgtttgccgatgaagtactaaaaagcacccatggtctgcgtgctattttgcataacgccagtgcgtggatggcggaaaaaccgggtgcgccactggccgacgtactggcttgcatgatgcagatccacgttaataccccatacctgctcaaccatgcgctggaaagattactgcgtgggcacggacacgccgccagcgatatcattcactttaccgattatgtggtggagcgcggtagcgacaaacatattgcgtatgctgcaagcaaagcggcactggataatatgacccgcagctttgcccgcaagctggcaccggaagtgaaagtgaattctattgcgccaagcctgatcctgtttaatgaacatgatgatgccgaatatcgacaacaggcgctgaataaaagtctgatgaaaaccgcgcctggcgagaaagaagtgatcgacctggtcgattacttacttaccagttgctttgtcaccggacgcagtttcccacttgatggcggtcgtcatctgcgttaatgcagctttatccagcatataatcaacacccatgcgcttatcccccaacacgcaacagaaccaacaaaagcggcgggcaagcgcatcattccggtgaaataccacaggctcaccaggtaaacaaaatagggaataatgctccacatactaaaaatgatggttgcgcgtaaggcttcaatgccgcgttcgctggcaacaatataatgcgcgataagcgcaaaggtcgggaaaagtggaatcagcccggcgatataataatttttcgtttttgctaaaacaccaatcaacagcactaccagcgcaccgagcgcggctttgattaccagccccatctttttaccttaacacttccataacaagtcatcagtagaatacctgatgaaaacttgtttagaaacgattgatagtaagtaaaaacagcgcggtgtattgtgacgtttttatatctaccgtgaatgttatgaacactatcgtatttgtggaagatgatgcggaagtcggtagtctgattgccgcgtacctggcaaaacatgatatgcaggttaccgtagagccgcgcggcgaccaggccgaagaaaccattttgcgagaaaatccggatttggtgttactcgacatcatgctaccaggcaaggacggcatgaccatttgtcgtgatttacgcgcaaagtggtctggaccgattgttcttctaacctctctcgatagcgatatgaaccacatcctggcactggaaatgggtgcctgcgactatattctcaaaacgacgccccctgctgttttgctagcgcgtttacgtttgcatttgcgtcagaatgagcaagccacactgaccaaaggtcttcaggaaacgtctctgactccctacaaagccctgcatttcggcacgttgaccatcgatcccatcaaccgcgtagtcaccctggctaacactgaaatcagcctcagcacagctgatttcgaattattgtgggaattagctacccatgccgggcaaatcatggaccgcgatgcattgctgaaaaatttacgcggcgtcagttatgacggactggatcgtagcgtggacgtggctattagccggttaagaaaaaaactgctcgataacgccgcagaaccttatcgcattaaaactgtgcgtaacaaaggctatctttttgcgcctcatgcatgggaataagcgatgaaaaaactgtttatccagttttacctgttattgtttgtctgcttccttgtgatgtctctgctggttgggctggtgtacaaatttaccgccgaacgcgcgggcaaacagagcctggatgatttgatgaacagtagcctgtatctgatgcgcagcgaattgcgtgagatccccccacacgactggggtaaaactctgaaagagatggatttaaatctctctttcgatctgcgtgtcgagccactgagtaaataccatcttgatgatatttccatgcaccgactgcgtggcggcgaaattgtcgccctggacgatcagtacacgtttttgcagcgtatcccgcgcagccactacgtgctggcagttggtcctgttccttatctttattatctccatcagatgcgattgctggatatcgccctgatcgcttttattgctatttccctcgcctttccggtgtttatctggatgcgtccgcactggcaggatatgttaaaactggaagcagcggcgcaacgatttggcgatgggcatctcaatgaacgtatccactttgatgagggtagcagctttgaacgacttggcgtcgcatttaaccagatggcggacaatatcaacgccttaattgccagcaaaaaacagcttattgacggtatcgctcacgaactgcgaacaccgttagtgcgcctgcgttatcgactggagatgagcgataacctgagcgccgccgaatcccaggcgttgaatcgtgatatcagtcaacttgaagctttaattgaagagctgctgacttatgcccgactcgatcgcccacaaaacgagcttcatcttagcgaaccagacctgccgttgtggctgagtacgcatctggcagatattcaggcagtaacgcccgataaaacggtacggataaaaacgctcgtgcaaggccattatgcggcgttggatatgcgcttaatggagcgcgtgctggataatttgctcaataacgccctgcggtactgccatagtacggttgaaaccagcctgctactgagcgggaatagagcgacattaattgttgaggatgatggcccagggattgccccagaaaaccgcgaacatatctttgaaccttttgttcgcctcgatcccagccgggatcgcagtaccggcggctgcgggctggggctggcaattgtccactctatagcactggcaatgggcggtacggttaattgtgacaccagcgaactgggtggtgcccgcttcagctttagctggccgttatggcataacatcccgcaatttacctctgcctgacactacgcgcacgatggtcaagtcaccacgactgtgctataaaataagtatgttgtaactaaagtggttaatattatggcgcgttacgatctcgtagaccgactcaacactacctttcgccagatggaacaagagctggccatatttgccgctcatcttgagcaacacaagctattggttgcccgcgtgttctctttgccggaggtaaaaaaagaggatgagcataatccgcttaatcgtattgaggtaaaacaacatctcggcaacgacgcgcagagcctggcgttgcgtcatttccgccatttatttattcaacaacagtccgaaaatcgcagcagcaaggccgctgtccgtctgcctggcgtgttgtgttaccaggtcgataaccttagccaagcagcgttggtcagtcatattcagcacatcaataaactcaagaccacgttcgagcatatcgtcacggttgaaagtgaactccccaccgcggcacgttttgaatgggtgcatcgtcatttgccggggctgatcacccttaatgcttaccgcacgctcaccgttctgcacgaccccgccactttacgctttggttgggctaataaacatatcattaagaatttacatcgtgatgaagtcctggcacagctggaaaaaagcctgaaaagtccacgcagtgtcgcaccgtggacgcgcgaggagtggcaaagaaaactggagcgagagtatcaggatatcgctgccctgccacagaacgcgaagttaaaaatcaaacgtccggtgaaggtgcagccgattgcccgcgtctggtacaaaggagatcaaaaacaagtccaacacgcctgccctacaccactgattgcactgattaatcgggataatggcgcgggcgtgccggacgttggtgagttgttaaattacgatgccgacaatgtgcagcaccgttataaacctcaggcgcagccgcttcgtttgatcattccacggctgcacctgtatgttgcagattaacgcccggctttcatactgccgaccatctgttctggccgtacccagctgtcaaactcggcttcgctaagataccccagcgcaagggccgcagcttttaaggtcagcccttctttatgcgcttttttggcgatctcggcggctttgtcataaccaatgtgggtgttaagcgcagtcaccagcatcaggctttcattgagtaattgattgattcgctcacgattcggttcaatacccactgcgcagtgtttgttaaaactttccatgccatctgccagcaagcgcacgctttgcaggaaattgtggatcaccattggacggaagacgttcagttcaaagttaccggaagcgccccccatgttgatcgccacgtcgttccccatcacctgacagcagagcatggttaatgcctcacactgtgttgggttcactttccccggcatgatactgctgcccggctcattttccgggatactgatttcaccaattccgcagcgcgggccagaggccagccagcggacatcattggcgattttcatcagactcgcagccaaccctttcaacgcgccgtgcgcctgaaccagggcatcacaggtcgccagcgcttcaaatttgttcggcgcggtaacaaacggtgcacaggtaatgactgccagttcatctgctacgcgacgcgcatactccggatgggtatttagtccagtacccaccgctgtaccgccaagagccagttccgctacgtgaggcaggctgtattcgatatgtttgagattatgctcgagcatcgctacccagccggaaatctcctgccccagcgttaacggcgtggcatcctgcaagtgagtacgaccaattttgacgatatcggcaaaagcacgggatttctcattcagtgtctgtgtcagggttttaagctgaggaatgagttgcttgcgcagcgccagcagcgccgcaacgtgcatcgccgtcggaaagacatcgttggaactttggcttttgttcacgtcgtcgttagggtgaactttacgttccatcccgcgcacaccgccgagtaattcactggcccggttagccagcacttcgttcatgttcatgttactttgcgtgccggagccggtctgccagatagccagcgggaattcgtcgtcatgctgtcctgccagtacttcatccgccgcctgacgaatggcgctcgctttctcttcagacaacaagcctaaatcttcattaacttttgccgctgcacgcttggttagcgccagcgcatgaatcagactggtgggcattttctccgtgctaatgcggaaatgctccaggctgcgttgagtttgtgcgccccacagcttatctgccgggacatcaatcgcccccatgctatctttttcgctgcgtactgtattcatgacctgctcctcacctgattaattttttctttctgttttgctttcgttaagcaacttttagctcacttattatttaccatttgataacaaatgtttggtctttcgtgccatgtaaaaaaaccgccccgaagggcggctctgtttatttcacacagcgggtgcattgtgtgagttgtatctgctggaagaagtcatttcctttatcatccacaaggataaacgccgggaaatcttccacttcaattttccagatggcttccattcccagttccggatattcaacacattccaggctcttaatacttccctgcgccaatacagcggccggaccaccgatactgccaaggtagaagccgccgtgttttttacaggcatccgtcacctgctggctgcggttgcctttcgccagcatgatcatacttccgccctgcgcttgcagttgatcgacataagaatccatccgtccggcggtcgttgggccaagagaaccggaggcataaccttccggcgttttggccggacccgcgtagtaaatcggatgatctttgatgtactgcggcagcccttcaccgttatccatccgctctttcagtttggcgtgagcaatatcacgaccgacgataatcgtgccgttaaggcttaagcgtgtagaaacgggatactggctcaactgtgcgaggatctctttcatcggacggttaaggtcaacgcgcaccgcttcgccttctcccgctttgcgcagctcttccgggatatatttgcctggattatgttccagtttttcgatccagatcccctgacggttgatcttcgctttgatattacggtcagcagagcaggagacgcccataccgaccgggcaggatgcgccgtgacgtggcaggcgaatcacgcggatgtcgtgagcgaagtatttaccaccaaactgcgcacccagaccaagattttgcgcttcgatcagcaattctttttccagttccacatcgcggaacgcctgaccgtgctcattcccttccgttggcagttcatcatagtatttcgcggaagccagtttcaccgttttaaggttcgtttctgcagaagttccaccaataacgaacgcaatatgatacggaggacaggccgccgtacccagcgtgcgcatcttctcaaccaggtaatttttcagtttccccggcgtcagtaacgctttggtttcctgatagagatacgtcttgtttgcgctaccaccacctttggcgatacagaggaatttgtattcgtcgccatcaacggcataaagatcgatctgcgctggcagattggtgccggtattcacttctttatacatatccagcggcgcgttttggctgtagcgcagattatcttcgatataagtgttatagacaccgcgcgccagcgccgcttcatcaccaccaccggtccatacacgctgcccttttttaccaacaataatcgcggtgccggtatcctgacaggttggcagaacgcctttcgccgcgatgtcggagttacgcaggaattgcagcgccacatatttatcattttcgctggcctccgggtcacgcagaatgtcggccacctgttgttggtgcgccggacgcagcatgaagctcgcatcatgaaacgcctggcgcgccaacagagttaacgcttcgggtgcgactttcaaaatctcctgcccttcaaattcagatacgctaacgtgttcgctggttagcaggtaatactcagtatcatcttttttgagtggaaaaggagcctgataatgaaagggtttgttactcattgttctctcacttactgcctggtttggttatgctctgggcgggtgttccgttgccctgttaaaagcgagtaacaatatcctacacacttttttaacaaaaactgagactagtacgactttttgcggctccaggttacttcccgtaggattcttgctttaatagtgggattaatttccacattaaaacagggattgatcatgcaaaaactcattaacagtgtgcaaaactatgcctggggcagcaaaacggcgttgactgaactttatggtatggaaaatccgtccagccagccgatggccgagctgtggatgggcgcacatccgaaaagcagtagtcgagtgcagaatgccgccggagatatcgttagtctgcgtgatgtgattgagagtgataaaagcactctgctcggagaggccgttgccaaacgctttggcgaactgcctttcctgttcaaagtattatgcgcagcacagccactctccattcaggttcatccaaacaaacacaattctgaaatcggttttgccaaagaaaatgccgcaggtatcccgatggatgccgccgagcgtaactataaagatcctaaccacaagccggagctggtttttgcgctgacgcctttccttgcgatgaacgcgtttcgtgaattttccgagattgtctccctactccagccggtcgcaggtgcacatccggcgattgctcactttttacaacagcctgatgccgaacgtttaagcgaactgttcgccagcctgttgaatatgcagggtgaagaaaaatcccgcgcgctggcgattttaaaaagcgccctcgatagccagcagggtgaaccgtggcaaacgattcgtttaatttctgaattttacccggaagacagcggtctgttctccccgctattgctgaatgtggtgaaattgaaccctggcgaagcgatgttcctgttcgctgaaacaccgcacgcttacctgcaaggcgtggcgctggaagtgatggcaaactccgataacgtgctgcgtgcgggtctgacgcctaaatacattgatattccggaactggttgccaatgtgaaattcgaagccaaaccggctaaccagttgttgacccagccggtgaaacaaggtgcagaactggacttcccgattccagtggatgattttgccttcagcctgcatgaccttagtgataaagaaaccaccattagccagcagagtgccgccattttgttctgcgtcgaaggcgatgcaacgttgtggaaaggttctcagcagttacagcttaaaccgggtgaaagtgcgtttattgccgccaacgaaagtccggtgactgtcaaaggccacggccgtttagcgcgtgtttacaacaagctgtaagagcttactgaaaaaattaacatctcttgctaagcttattaaaggcttataacaccttcaggcggccagtccgcctgatttcattttatggataatcattatgaataaaagcctggtagcggtaggcgtcattgttgcgctaggcgtagtctggacaggcggcgcatggtatacaggcaagaagattgaaacccatctcgaagacatggtcgcgcaggcgaacgcgcaactcaaactgacagctcctgaatccaacctggaagtgagttatcaaaactatcatcgcggcgtattcagcagccagttgcaactgttggtgaaacccattgccgggaaagaaaatccgtggattaaaagcggtcagagcgtcatcttcaacgaaagcgttgatcatggtcccttcccgcttgcccagcttaaaaaactgaacctgatcccgagcatggcaagtattcaaaccacgctggttaataacgaagtaagcaaaccactgtttgatatggcaaaaggtgaaacgccttttgagattaacagccgcattggttacagcggtgattccagttccgatattagcctcaagccactgaattacgagcaaaaggatgaaaaagtcgcctttagcggcggcgagttccagttaaatgctgacagagacggcaaagccatctccctttccggggaggcgcaaagtggtcggatagacgcagttaacgaatacaaccagaaagtgcagttgacctttaataatctgaaaaccgacggttccagcacgctggcaagttttggtgagcgtgtaggaaatcaaaaactgagtctggaaaaaatgaccattagtgtggaaggcaaagaactggcactgctggaaggcatggagatcagcggtaaaagcgatctggtcaatgacggtaaaacgatcaatagccaactggattacagcctaaacagcctgaaggtacagaatcaggatctgggcagcggcaagctgactttaaaagtcggccagattgatggtgaagcctggcatcagtttagccagcaatataacgcgcaaactcaggcgctgctggcacagccagaaattgccaacaaccccgaactttatcaggagaaagtgacggaagccttctttagcgccctgccgctgatgctgaaaggcgatccggtgattactatcgcgccgctaagctggaaaaacagtcagggtgaaagtgccctgaatctgagcctgttcctgaaagatccggcaacgactaaagaagcgccgcaaacgctggcgcaggaagtagatcgtagcgttaaatctctggatgcgaaactgaccattccggtggatatggcaactgagtttatgactcaggtagcgaagctggaaggttatcaggaagatcaagcgaaaaaactggcgaaacagcaagttgaaggtgcaagtgcaatggggcagatgttccgtctgaccaccttgcaggacaataccatcaccaccagcctgcaatatgctaacggtcagataacgttaaatgggcagaaaatgagcttagaagattttgttggcatgtttgcgatgccagctcttaacgttccggctgtaccggcaattccgcagcagtaattcacggccaaaacgccggagaattttcactccggcgttttcatctgaaaacaaaccagagattgcctgatgcgctacgcttatcaggcctaccttttcctgcaacactttgaatttatgagtttttgtaggctggataaggcgtttacgccgcatccggcataaaaaacgcgcactttgtcaacaatctgaaacgccggagatttttctctccggcgttattttttacttcagcataaagtcatactgaatactcattttcacatcccagtaattcaggcgatcgcccagcgtactgccatcgcgcttttcccgccctttatcggcagcaagaaagaaattcatcccttgtaacggcccttcgctgacccgatagttcataccacctaagatacccgtgccttcaatccgcacatctcgtttactggattcatagccgcgagtcacaatcggtgcaaatgtcagcgtaaattgcggcgttaaacgatagttgacgcccaattgccaggactgcattccttcacggttacgatcaagacttaaactaaagggatagccaatgtcggtatccaccacggcaccattcattgcatggcgcaaataaccaccactgccaaatacacttccccacggcgcattccaggtcaattgtccactaaccaacgccgtttcattgggctggctggtattacgacttaaaccttcgagctgcgcgtaaaagccgagcaactcccctttcaacgtataattcgggtcgagcggtatgcttttctcgagaatactttgtatctgattggaaacatctttctgtacgcttgcccccagagaatagcgactggtatcatcatgccaactggcggctaaaaaagaacgtgcgcgatgtttatcgtattttcccgtctggctgttatacaccccttcatcacgaataccggttgtactatcagtccataaaaatactcgactacgccacattccccacagatcaatatttggtgttaaagcccaataacctaatgctccttcagaaactgtcggtaatgtacgttggctactgccagccattaacggaatacgataaggtaagctaccataactataatccgtcccgaagcgacctaatttaagcaggctattttcactgggttttatttttactgcccccagggcaaagccaaaacttttatcaccatcaagataccaccgggtactcatatcagcacgagcacctaatttataaacataatacgccccgccttcaacgccaataatattggaataataaccactattgaaatcgagcaatcctccctgtacccatgcgtaaatatctcttcccgcgccagcactgggcttatccgccctgcgcaattcgtttttcagtctgatgcgtagtcccgcttcatcgtcagccagttgcgccgcataagcagaggtaaggccagaggcagccgtcaggcaaataacggccatggccactatttttctcatagttgcacctttgatgttctgattatttttattgaatattaattagtgatatcgctgattaattgctgctgcacttttttacgattatcaatttcaaccacgatttctttgaattttttatccgtgagcggataaaaccagataataacgaatgccagtagcataaatccgcaaggtactaaggcaatacttgtgcggatgcccataataacttccggcgtttgcacctgattggcgatatatccgcttaaccccaaaataaaggcaggaatactacctccgattgcctgaccgcatttacgggtaaaactgaatagactataggtgagcccttcaattcgcacgccggtcaggtattcaccgtattctacggtatcagcttccagcgcccacatcacggtcatggtaacgccctgaccaatactagcgatggccaacgcaaccaacgccaccggcagactccagacggaaacccagaagaacagcagataaccgcaggttcccagcaaagcgccaatcaggaaggtattctttttaccgatcctcgcgaccatccccggcaccagcggtgcgcttgccacagtaccaaccaggttttgcaccagtaccagcacagtgaacagcccggtatcatttaacacatagcgcacgtagaacaagctgctggcgctgaccgcaaaggtgctaatcagcacacacagcgcaccgatgcacaacataaacagcgggcgattccgtttcagggtttgcagactgatattcaaactcggctgcgcaacgatacgtaccacattctcacgcgtgcttttgaagcagatgaagtaaagcaccattccggcaatcgccagcacaattgtccagaaatggtatacgctcaccatctcttccgggctggagttcttaatgctcggtcctatcagaaatgccaggcagacaaaggtcaaactagcggcaatcccacgagccgcgcccagacgggcgcgggattgtggttgttgggtcatcgcggtagcaagactaccataaggaatattcaccaggctgtagcaaagcccgaggcccatgtaggtcaaatatgcatacaccactttgctaccatggctccagtcggtcagcacccagaataccagcacgctgaagatcattaacggcgcagtaccgaagagtaaaaacgggcggaattttccccagcgggtattcacactgtccaccactcgtccggcaaagacgtcggcgaaggcatcgaatacccgcaccagtaacagcatggtgcccgccgcagcggcaccgacgccagcgacgtcggtgtagtaactcaacaggaagagcgcccccattgcgaaggcgaagttattggcgacgtcaccgaggctgtagccgacgatggtgcgccaggagagttgttgattcattgtttgcctccctgctgcggtttttcaccgaagttcatgccagtccagcgtttttgcagcagaaaagccgcgctcttcggtttgcggtcgcgagtgaagatccctttcttgttaccgccaacgcgcaatatgccttggctggtcgcaaaatcggcgaaattccatacctgttcaccgacgacggcgctgacgcgatcaaagacgcggtgatacatatccagccatgcacactgatactcttcactccacatgtcggtgtacatactgtgcagcccggctaacgtatccacgccgtattcggtgatgataatcggctgatgcagtttctcctgccaggccagaagttctttttccagtaccttctctgccgtttccaaatcgccgctttggacataccatccgtaataacggttcaggcacagcacatcaaagagatcgctgatggtatcggtgtgagcgtcgcagaacattacattgacgcaggtgatcggacgcgtcgggtcgagtttacgcgttgcttccgccagtggcgcgaaatattcccgtgcaccttgcggacgggtatccggttcgttggcaatactccacatcaccacgcttgggtggtttttgtcacgcgctatcagctctttaatcgcctgtaagtgcgcttgctgagtttccccgttgactgcctcttcgctgtacagttctttcggcttgttgcccgcttcgaaaccaatgcctaaagagaggttaaagccgacagcagcagtttcatcaatcaccacgatgccatgttcatctgcccagtcgagcatctcttcagcgtaagggtaatggctggtacggtaggagttggccccaatccagtccattaatgcgtggtcgtgcaccatcagcacgttatcgaatcctttgccacgcaagtccgcatcttcatgacgaccaaagccagtaaagtagaacggtttgtggttaatcaggaactgttcgcccttcactgccacactccggatgccgacgcgaagcgggtagatatcacactctgtctggcttttggctgtgacgcacagttcatagagataaccttcacccggttgccagaggtgcggattcaccacttgcaaagtcccgctagtgccttgtccagttgcaaccacctgttgatccgcatcacgcagttcaacgctgacatcaccattggccaccacctgccagtcaacagacgcgtggttacagtcttgcgcgacatgcgtcaccacggtgatatcgtccacccaggtgttcggcgtggtgtagagcattacgctgcgatggatcccggcatagttaaagaaatcatggaagtaagactgctttttcttgccgttttcgtcggtaatcaccattcccggcgggatagtctgccagttcagttcgttgttcacacaaacggtgatacgtacacttttcccggcaataacatacggcgtgacatcggcttcaaatggcgtatagccgccctgatgctccatcacttcctgattattgacccacactttgccgtaatgagtgaccgcatcgaaacgcagcacgatacgctggcctgcccaacctttcggtataaagacttcgcgctgataccagacgttgcccgcataattacgaatatctgcatcggcgaactgatcgttaaaactgcctggcacagcaattgcccggctttcttgtaacgcgctttcccaccaacgctgatcaattccacagttttcgcgatccagactgaatgcccacaggccgtcgagttttttgatttcacgggttggggtttctacaggacgtaacataagggactcctcattaagataataatactggtcaacctttaatctgattagttaaccaattctgtgttgcacacagttatctgtgagaaacccatggaagagaaatggaaataaaaagaactgacaccgcgatcaaaaaaccaaaaactgcaatacccacagcgtgatatagatcgcattaatctttaaaacagcgttgacagaagccataaaataagcaaccgaacgttcgttcgagcgtattgggaacgataaactctcatgacatatggctacagtgaatattttggggggaattctccgaagccgggaaggataatttttgcacagagaaattacgatatgaaacgcgggcacagttatcaccagcccgccgaaaaagagagagaatcaggatgcggttaagataccgccaatcatcgcgcgtaatccctgagcaaagctcgcttcacgcgccaggtcttccgcttcgatatcggccagtacaccgtaggtcagatccagcagtaaacgactagtcattgccgtgttgatgtctgggcttatctcgcctttttgctgggcatcacgcatccgctgggcaacaaattccgtgatcgtcatatgcttatttttaagcatggcggcgacctgtgggttacgcatcccttccgccataatttcaaccaccagcgcccgttgtccaaaggcttcatgggtgagagagacaatggactcgaccatatagtcaacgaaatgaatcccttcaatcggttcccggaaacgggccagcgccctctcctggtcctgtaagataatcgcctgaatcaaggcttctttggagatgaaatggtgatagagcgtcccgggactaatggcgcaagatttacagatggctttcatgctggcactgtgaaatccattttcactaaaaatctctctggcagcattgaggatccgggtccgtgtcggttgtgcttcagtctgcatgttatccatcattaaaccattatagttagcgtgaataactagtttaccgcgttgtcaggtgagcgcctatcattgctgttgaatagtgcgaaggcacactctattcgtatacttttcactctgaaattggttaaccaatagccgtgatttggctgccagttatttagcagagacgttgatgagtttatcccggtaaacaacacgcacggttgtttaccggtccgttagtgtattaattgagctcctgtaccccaccaccggagacggtgagaatttgtccgcttacccagctcgcagcagggctgcaaaggaacagcgctgcgttagcaatatcttgcggttggcccagacgtctgatcggcgtgtgctgtaacattttttgttcaatttctggtgtaataacggatttcagggcatcggttaatattgcccccggcgcaatgccatttacccgaatatttttttcacccaggtcaaacgccatatttctgaccagatgactggccgcagctttagaacttgcataggaagtcatgtttatatttttattttctgccgccatagaagtgatggtcagaataacgccaccgccatttttttccatttctggcgcaacaagttgactcagatggaaaaaagaaaacacattcagttcataagcacggcgaaaatccgccattggcatatcaaacggtttaggtccaccgccaccggcgttgttaaccagaatatcaactttacccagcttactgatagcaaagtctgccagtgcagagagttcctgttcggaagtaatatcacaacggcaggcaaatgcctgaccacccagttgttgaatttcgtctacaacatggttagctgcgtcggcgttaatatcactgaccaccacagatgcgccagctgtcgcgaatgtaatggcgatttctttaccaatacctgcacccgcacctgtgatgatggcgcattttccgtcgagtctcaggttgtcagaattaaacacataaacctcctgtgaacttcagtaaaaataaaaggcaccgcctgtgtgccacattttttatcattaaccttgaggaaaggacactaccaggtatagcagataaagagaggattatttcgctgcaatgagccgggcgggaataataagattgcgactatgcgtctcttcatgggtgattttttgcatcatgcgatccgcaagtgtgataccaagttcccgcgctggcgtgctggcccaggtaacaggtatatcatcaagtgtggttggtgtcgcatcggtaaatgccgccaggctaacctgttgctcaaagtaacgatcgactccgctttccccgctttgccgccctgctttgagcaaaccaaaccatgcccccatcgcaatagtttcgttatagcaaaccacggcactgatggtcgggttatgacgtaaaagcgccgtgatagcttccgcggcttgcttctggctggaagtgcactccaacacccaatcgctatgaaacggcaggccaaattttagtagagttgcacaatagcccccaacccgttctgcacgggttaaactggaactttgccctcccagccaggcgatccgctgatgcccattgcgaatgagatgctccgtcaacaactgtgcagcctgcatgttgtccgggcgaaccgtatcaacatcatcaagataactggcacgggaagcgaaaatcaccgggatagctttttcttctgccatccgtcgcaggtcatcgctacttcctgcagctccggcaattaccacaccatcgacaccctgattcagtaacagactaaaccgctgtgccagctgctcaccgtctttaccgccgtgaagcaaaaaaaccatccgtccctgcgcttccagagcttccgtcaatccggccgtcaattcggcgtaaaacggcgcagataaatcacggacgatcaaaccaatgacgccgctttgcccgccgcgcagcgcgctcgcctggcgattgcgcacaaatcccagctcttcaatggcggcgttaacgcgttctcctgtggcggtagagattcgccctttgccactaagcaccaggctaacggtacttacgctcacgcccgcagccagcgcaacatcatgaatggttatttttttggcggtagccatgcagatgacctactccctgattatgtgacagataaaacgttttaccttttatttatcttatacccgctattatcgttgcgtaatgtgatttatgcctcactaaaatttgataaaacgttttatcttctcgcgcaatttactgaatccagattgttctctacgaggagtcgttttatgacggcgaaaacagcaccgaaagtcacgctgtgggagttcttccagcagttaggcaaaaccttcatgttacccgtggcattattgagcttctgcggcattatgctcggcattggtagttctcttagcagccatgatgtcataaccctgatcccggtcctgggcaaccccgtgttgcaggctatctttacctggatgagtaagattggcagctttgcttttagtttcctgcctgtcatgttctgtatcgccatcccgctgggcctggcacgcgaaaataaaggcgtagcggcattcgctggcttcatcggttatgcggtaatgaacctcgcggtaaacttctggttgaccaataaaggcattctgccaaccacggatgccgcggttctgaaagccaataacatccagagcattcttgggatccagagcatcgataccgggatcctcggtgcggtgatcgccggtattatcgtctggatgctgcatgagcgtttccataatatccgcctgccggatgcgctggcattcttcggcggtacgcgcttcgtaccaattatctccagcctggtgatgggccttgtcggcctggtgattccattagtctggccgattttcgccatgggtattagcggcttgggccatatgataaacagcgcgggtgatttcggaccgatgctgtttggtaccggtgaacgtctgctgttgccgtttggtctgcatcacattctggtggcattaattcgctttaccgacgcaggcggcacgcaggaagtctgcggtcaaaccgtcagcggcgcactgaccatcttccaggcgcaattgagttgcccgaccactcacggtttttctgaaagcgccacgcgtttccttagccaaggtaaaatgcctgcgtttctcggcggtctgccaggtgcagcgttagctatgtatcactgcgcgcgcccggaaaatcgccataaaattaaaggtctgctgatttctggcctgatcgcctgcgtcgttggcggcactaccgaaccgctggaattcctgttcctgttcgtagcgccagttctgtatgtcatccacgcgctgttaaccggcctcggcttcaccgtcatgtctgtgctcggcgtcaccatcggtaataccgacggcaatatcatcgacttcgtggtgttcggtattttgcatggtctgagtaccaagtggtacatggtgccagtggtggcggcaatctggtttgtcgtttactacgtcatcttccgtttcgctatcacccgcttcaatctgaaaaccccggggcgcgatagcgaagttgccagcagtatcgaaaaagccgttgccggtgcgccgggtaaaagtggttacaacgttcctgcaatcctcgaagcattaggcggtgccgacaatattgtcagcctcgataactgcattacccgtctgcgtttgtctgtgaaagatatgagccttgttaatgtgcaggcactgaaggacaatcgggcaattggcgtagtacaacttaatcaacataacctgcaggttgttatcgggccacaagttcagagtgtaaaagatgaaatggccggtctgatgcatactgtccaggcataaggataagatatgttcgattttagtaaggtcgtggatcgtcatggcacatggtgtacacagtgggattatgtcgctgaccgtttcggcactgctgacctgttaccgttcacgattagtgacatggattttgccactgccccctgcattatcgaggcgctgaatcagcgcctgatgcacggcgtatttggctacagccgctggaaaaacgatgagtttctcgcggctattgcccactggttttccacccagcattacaccgccatcgattctcagacggtggtgtatggcccttctgtcatctatatggttagtaaactgattcgtcagtggtctgaaacaggtgaaggcgtggtgatccacacacccgcctatgacgcattttacaaggccattgaaggtaaccagcgcacagtaatgcccgttgctttagagaagcaggctgatggttggttttgcgatatgggcaagttggaagccgtgttggcgaaaccagaatgtaaaattatgctcctgtgtagcccacagaatcctaccgggaaagtgtggacgtgcgatgagctggagatcatggctgacctgtgcgagcgtcatggtgtgcgggttatttccgatgaaatccatatggatatggtttggggcgagcagccgcatattccctggagtaatgtggctcgcggagactgggcgttgctaacgagcggcagcaaaagtttcaatattcccgccctgaccggtgcttacgggattatagaaaatagcagtagccgcgatgcctatttaagcgcactgaaaggccgtgatgggctttcttcccctagcgtactggcgttaactgcccatatcgccgcctatcagcaaggcgcgccgtggctggatgccttacgcatctatctgaaagataacctgacgtatatcgcagataaaatgaacgccgcgtttcctgaactcaactggcagatcccacaatccacttatctggcatggcttgatttacgtccgttgaatattgacgacaacgcgttgcaaaaagcacttatcgaacaagaaaaagtcgcgatcatgccggggtatacctacggtgaagaaggtcgtggttttgtccgtctcaatgccggctgcccacgtagcaaactggaaaaaggtgtggctggattaattaacgccatccgcgctgttcgttaaccccaattgcgcaacgtaaaaaatcgttgcgcaatcgtggatttttaccctgctttgtttttataatggtgcgcacttttatatccagaaaaagagtgcgaccatgattgataccaccctgccattaactgatatccatcgccaccttgatggcaacattcgtccccagaccattcttgaacttggccgccagtataatatcagccttcctgcacaatccctggaaacactgattccccacgttcaggtcattgccaacgaacccgatctggtgagctttctgaccaaacttgactggggcgttaaagttctcgcctctcttgatgcctgtcgccgcgtggcatttgaaaacattgaagatgcagcccgtcacggcctgcactatgtcgagctgcgttttagtccaggctacatggcaatggcacatcagctgcctgtagcgggtgttgtcgaagcggtgatcgatggcgtacgtgaaggttgccgcacctttggtgtgcaggcgaagcttatcggcattatgagccggaccttcggcgaagccgcctgtcagcaagagctggaggcctttttagcccaccgtgaccagattaccgcacttgatttagccggtgatgaacttggtttcccgggaagtctgttcctttctcacttcaaccgcgcgcgtgatgcgggctggcatattaccgtccatgcaggcgaagctgccgggccggaaagcatctggcaggcgattcgtgaactgggtgcggagcgtattggacatggcgtaaaagccattgaagatcgggcgctgatggattttctcgccgagcaacaaattggtattgaatcctgtctgacctccaatattcagaccagcaccgtagcagagctggctgcacatccgctgaaaacgttccttgagcatggcattcgtgccagcattaacactgacgatcccggcgtacagggagtggatatcattcacgaatataccgttgccgcgccagctgctgggttatcccgcgagcaaatccgccaggcacagattaatggtctggaaatggctttcctcagcgctgaggaaaaacgcgcactgcgagaaaaagtcgccgcgaagtaacaaaatggatggtgcaaatgcaccatccatttttcatgcaaggcacaaagtcgcgcgatgtttggcggattcgatgcccagctcaatcaactccattacctggattgcctggcttgccggaaccggattttcaccatcgccatttaacgcatcacgaatagccgcatagtaagccggataattcccaggcaccgtcaacagcgtttcttcgacacgttcctcaccttccacgcgggtaagtacgccatcacgcatatcgtagccccagtcttcctgcggtagacgctcgccatttttcagacgttcttcctgtggatcgaggccatatttcacataactgcctcgggatccatgcacgatataccgtgcactctcagcggctgccagcatggtaccgtgtaaaatgactcgccgctgtggataggacaagatggcgtggaaataatcggtgctctgcgctccgggccgtaactgtgccaaatctaccgtcatgctgaccggtaaaccaaaaagcgtaatggcctgatcaagaagatgtggtgctaaatcgtaccagataccgctgcctgggccgccctgttcacgccaacgatcgcgcacctgcggacggaagcggtcaaaatgagactcaaagtaagcaacttcacccagcacgccttccgcgagtaaaccttttagcgtcaagaaatcgctatcccagcgacggttatggaatacagacagcacacgccccaggctttttgccagcgcatccagctctcgcgcttgactcagtgtcacggtaaagggtttatcaacgaccacatgtttacccgcctcaagcgccgctttggctaacgggaaatgggtatcgttgggtgtaggaatgacaatcaggtctatgttgggatcgttaaacagatgcttcggctcagagacaaccgtaaccgttggccagtcggcttttacttttgtttcatcactgctggagattaccgccagttcctgcccgggcgtgcccgcaatcaggggcgcatggaaggttttgctcgcataaccatacccaatcaacccaacacggatgttgtcgctcatgtcattgcctctcattgaagtatgatggctatttgacactatcctttacccacgctcaacagtttaataacctgccagcaataagggatgttgtttaacttaagtcaaaaaaatagcgaattttccaacgacaaaagctaaatatcgcaaaaacctcagtaaaaatcttgctggagctattattgctaagtaacatttaccccctgaagttaatggatcaatcaagagagatgtgggctgtaatgaatcgtcttattgaattaacaggttggatcgttcttgtcgttagtgtcattcttcttggcgtggcgagtcacattgacaactatcagccacctgaacagagtgctagcgtacaacacaagtaagctctgcacttgtggagcgacatgctgcccgtccgggtgcatgttttcacttgtcggatattaaaccaggaatttattatcttgttcgatgttgttggtgattgtcagggatagtaaagcgcgttactcttttcagagcagtttttcatccctgaatatttgccatcagcgcattcttattattgtaataacacaagcgttcacttttggtgaaattttatcatcactaataatacctacccctttggtattaattattttatggaccttttatgactgttcaggactacttattaaaatttcgcaaaatcagtagtctcgaaagtctggaaaaactctacgaccatcttaattacaccctgacggacgatcaggaactgatcaatatgtatcgtgctgccgatcaccgtcgcgcagagctggtttctggcgggcgtttgtttgacctcggccaggtaccgaagtccgtctggcactatgtccaataaagaaagtagcgatcggttataaaagccttataataacgcccctaaaattagatttgcctgtttgcgtcgctattctggagaacctatgaccaccacaacgccacaacgtattggaggctggttgcttggcccgttggcctggcttttagtcgctctgttgagtacgacgctggcgttgttgctgtataccgctgcgttatcttctccgcaaacatttcaaacgctcggcggacaagcactgacgacacaaatcttatggggcgtttcttttattaccgctatcgccttgtggtattacacactgtggttgaccatcgctttctttaaacgtcggcgttgtgttcctaaacactatattatctggctgcttatttccgtattgctggcagtaaaagcattcgcttttagtcccgtggaagatggcatagccgttcgccagttgctgtttactttgttggcaaccgcattgatcgtcccctatttcaaacgcagcagccgggtaaaagcgacgtttgtgaatccgtaataaccttacagttaacctgttgtcgcctgctctggattaacggataataggcggcttttttatttcaggccgaaaaatgactgactacctgttactgtttgtcggaactgtactggtcaataactttgtactggtcaagtttctcggtctctgtccgtttatgggggtttccaaaaaactggaaaccgcgatgggcatggggctggcaacaacgtttgtgatgacgctggcgtctatttgcgcctggcttatcgatacgtggattttgatcccacttaatctgatttacctgcgcaccctggcatttattctggtgattgctgtggtcgtgcagttcaccgagatggtggtgcgcaaaaccagcccggtgctttaccgtctgctggggatttttttgccgcttatcaccaccaactgtgcagtgctcggcgtggcgttgctgaatatcaatctcgggcacaatttcttgcagagcgcgctgtacggtttttccgccgctgtcggtttcagcctggtgatggtgctcttcgccgccatccgcgaacgccttgctgtggctgatgtcccggcaccttttcgcggtaatgccattgcgttaattaccgcaggtcttatgtctctggcctttatgggctttagtggtttggtgaagttgtaatgaatgctatctggattgccgttgccgccgtgagcctgctgggcctggcgtttggcgccattctgggttatgcctcccgccgttttgcggtggaagacgatccggtcgttgagaaaattgacgaaatcttaccgcagagccagtgtggtcagtgcggttatcccggctgtcgcccctacgcggaagccatcagctgtaacggtgaaaaaatcaaccgttgcgccccaggtggcgaagctgtgatgctaaaaattgccgagttgcttaatgtcgagccgcagccgctggatggcgaagcgcaagagataacgcctgcgcggatggtggcggttattgatgaaaataactgtattggctgcactaaatgtattcaggcgtgtccggtagacgccatcgttggcgctacccgtgccatgcatacggtaatgagtgatctctgtacgggctgcaatttatgtgttgatccgtgcccgacgcactgcatcagcttgcaaccggtcgcagaaacacctgactcctggaaatgggatctgaacaccattcccgtgcgtatcattcccgtggaacaccatgcttaagttattctctgcattcagaaaaaataaaatctgggatttcaacggcggcatccatccaccggagatgaaaacccagtccaacggtacacccctgcgccaggtacccctggcgcagcgttttgttattccactgaaacagcatattggcgctgaaggtgagttgtgcgttagcgtcggcgataaagtattgcgcggccagccgcttacccgtggtcgcggcaaaatgctgcctgttcacgcgcccaccagcggtaccgttacggctattgcgccccactctacggctcatcctagtgctttagctgaattaagcgtgattattgatgccgatggtgaagactgctggatcccgcgcgacggctgggccgattatcgcactcgcagtcgcgaagagttaatcgagcgcatacatcagtttggtgttgccgggctgggcggtgcaggattcccgacaggcgttaaattgcagggtggcggagataagattgaaacgttgattatcaacgcggctgagtgcgagccgtacattaccgccgatgaccgtttgatgcaggattgcgcggctcaggtcgtagagggtattcgcattcttgcgcatattctgcagccacgcgaaattcttatcggcattgaagataacaaaccgcaggcgatttccatgctgcgcgcggtgctggcggactctaacgatatttctctgcgggtgattccaaccaaatatccttctggcggtgctaaacaattaacctacattctgaccgggaagcaggttccacatggcgggcgtagttccgatatcggcgtattaatgcaaaacgtcggcactgcttatgcagtgaaacgtgccgttattgatggcgagccgattaccgagcgtgttgtaaccctgactggcgaagcaatcgctcgcccgggcaacgtctgggcacggctggggacgccagtgcgtcatttattgaatgatgccggattctgcccctctgccgatcaaatggtgattatgggtggcccgctaatgggctttaccttgccatggctggatgtcccggtcgtaaagattaccaactgtctgttggctccctctgccaatgaacttggcgaaccacaggaagaacaaagctgcatccggtgtagcgcctgtgctgacgcctgccctgcggatcttttgccgcaacagttgtactggttcagcaaaggtcagcaacacgataaagctaccacgcataacattgctgattgcattgaatgtggggcttgcgcgtgggtttgcccgagcaatattcccctggtgcaatatttccgtcaggaaaaagctgaaattgcggctattcgtcaggaagaaaagcgcgccgcagaagccaaagcgcgtttcgaagcgcgccaggctcgtctggagcgcgaaaaagcggctcgccttgaacgacataagagcgcagccgttcaacctgcagccaaagataaagatgcgattgctgccgctctggcgcgggtgaaagagaaacaggcccaggctacacagcctattgtgattaaagcgggcgaacgcccggataacagtgcaattattgcagcacgggaagcccgtaaagcgcaagccagagcgaaacaggcagaactgcagcaaactaacgacgcagcaaccgttgctgatccacgtaaaactgccgttgaagcagctatcgcccgcgccaaagcgcgcaagctggaacagcaacaggctaatgcggaaccagaacaacaggtcgatccgcgcaaagccgccgtcgaagccgctattgcccgtgccaaagcgcgcaagctggaacagcaacaggctaatgcggaaccagaagaacaggtcgatccgcgcaaagccgccgtcgaagccgctattgcccgtgccaaagcacgcaagctggaacagcaacaggctaatgccgagccagaacaacaggtcgatccgcgcaaagccgccgtcgaagccgctattgcccgagccaaagcgcgcaaacgggaacagcaaccggctaatgcggagccagaagaacaggttgatccgcgcaaagctgccgtcgaagcggctattgcacgcgccaaagcacgcaagctggaacagcaacaggctaatgcggtaccagaagaacaggttgatccgcgcaaagcggcagttgccgcggctattgcccgcgctcaggccaaaaaagccgcccagcagaaggttgtaaacgaggactaaatggtattcagaatagctagctccccttatacccataaccagcgccagacaagccgcattatgctgttggtgttgctcgcagccgtgccaggaatcgcagcgcaactgtggttttttggttggggtactctcgttcagatcctgttggcaagcgttagtgctctgttagccgaagctctcgtactcaaactacgcaagcagagcgtagccgcagcgttgaaagataacagtgcattgctgacaggcttattgctggcggtaagtattccccccctcgcgccatggtggatggtcgtgctgggtacggtgtttgcggtgatcatcgctaaacagttgtatggcggtctgggacaaaacccgtttaatccggcaatgattggttatgtggtcttactgatctccttccccgtgcagatgaccagctggttaccgccacatgaaattgcggtcaacatccctggttttatcgacgccatccaggttatttttagcggtcataccgccagtggtggtgatatgaacacactacgcttaggtattgatggcattagtcaggcgacaccgctggatacatttaaaacctctgtccgtgccggtcatagcgttgaacagattatgcaatatccgatctacagcggtattctggcgggcgctggttggcaatgggtaaatctcgcctggctggctggcggcgtatggttgctatggcagaaagcgattcgctggcatattcccctcagcttcttagtaacgctggcgttatgcgcaatgttgggctggttgttcagtccagaaacactggcagcaccgcaaattcatctgctgtctggagcgaccatgctcggcgcattctttattttgactgacccggttaccgcttctacgaccaatcgtggtcgtcttattttcggcgcgcttgcgggcttattagtctggttgatccgcagtttcggcggctatcctgacggcgtggcttttgccgtcctgctggcgaacatcacggttcctctgatcgattactacacgcgtccgcgcgtctacggccatcgcaaagggtaaaccatgctgaaaactatccgaaaacacggcattacgttggcgctatttgcagcgggtagtacagggttaactgcggccatcaaccagatgaccaaaacgacgattgctgaacaggccagtctgcaacaaaaggcgttatttgatcaggtgctgccagccgaacgctataacaatgcgctggcacagagttgctatctggtaactgcgccagagttaggtaaaggtgagcatcgggtttacatcgccaaacaggatgacaaaccggtagccgccgttctggaagcaaccgcgccagatggctattccggtgcgattcagctgctggtgggagccgattttaacggcacggtacttggcacgcgcgtgacagagcaccacgaaacgccagggcttggcgataaaatcgaactgcgcctttctgactggatcacccattttgcgggtaaaaaaatcagtggtgcagatgatgcgcactgggcggtgaagaaagatggtggtgatttcgaccagttcaccggcgcgacgattactccccgcgcggtggttaatgcggtaaaacgcgccggattgtacgctcagacgttaccggcacaactttctcaacttcctgcctgtggagaataaagcgtgagcgaaattaaagacgttattgttcaggggttgtggaaaaacaactctgcgctggtccagttgctcggcctttgtcctctgttggcggtcacgtccactgccactaacgctctgggtttaggacttgcgactacgctggtactgacgctgaccaacctgaccattagcacgctgcgtcactggacgccagccgagatccgcattcccatttacgtgatgatcatcgccagcgtggtcagcgctgtacagatgctgatcaacgcctacgcctttggcctgtatcaaagtttagggatttttattccgctgattgtcactaactgtatcgttgtgggccgcgctgaagccttcgccgccaaaaaaggtccggcgcttagcgcactggacggctttagtattggtatgggcgcaacctgcgccatgttcgtgctgggtagtctacgcgaaattatcggcaatggcacattgtttgacggtgcagatgcgctgttaggtagctgggcaaaagtattacgcgtggagattttccacaccgactcccctttcctgctggcgatgctgccaccaggtgcatttattggcctgggactgatgctggcaggaaaatacctgattgatgaaagaatgaaaaagcgccgtgctgaagcagctgcagaacgtgcattgccaaacggtgaaacagggaatgtctgatgaataaagcaaaacgcctggagatcctcactcgcctgcgtgagaacaatcctcatcccaccaccgagcttaatttcagtagcccttttgaattgctgattgccgtactgctttccgctcaggcgaccgatgtcagtgttaataaggcgacggcgaaactctacccggtggcgaatacgcctgcagcgatgcttgaactgggcgttgaaggggtgaaaacctatatcaaaacgattgggctttataacagcaaagcagaaaatatcatcaaaacctgccgtatcttgctggagcagcataatggcgaggttccggaagatcgtgctgcgcttgaagccctgcccggcgtaggtcgtaaaacagccaacgtcgtattaaacactgcattcggctggccgactattgctgtcgacacgcacattttccgcgtttgtaatcgtactcaatttgcgccggggaaaaacgtcgaacaggtagaagaaaagctactgaaagtggttccagcagagtttaaagtcgactgccaccattggttgatcctgcacgggcgttatacctgcattgcccgcaagccccgctgtggctcttgtattattgaagatctttgtgaatacaaagagaaagttgacatctgaagaaaaggggtaacaccgattaccccattgataacctttctttatcctcttttaaaacatctttttaacgtcaatgatgccattgcttagcgttatcatcaggtaatccgtttgcggataaccaaaaatgcaggttaattgtttttttaatagcgaaattttctattcattcgtgatcaagatcacgatgctgtcgcaatgtaaaaacattgcaagaatcaggttaaaatcatttaaatttacacacgcaacaaatattgacctacaaaacattacactggctatttttcagaaactggactatctcactagtaaaaacgctaaatagcagaacatatcgccgttaagccatcacccccctctcagtgcagtgaaaaaatctgccgttacgttttttgaaaaatttaacgctggataacatttcccggaatggttgaattccccgcctcagttatatgtaacagattattacaaaggacttgtctgaaagtgcaagatagtgaacattacctgccgtttcccctcccactataacaattgcgcgtatgttttttatacataacgcgagaaagcacccccgttaatatgggatgtaaaaaaagaggtaaaagtgtccactgcaaaccaaaaaccaactgaaagcgtcagtttgaacgctttcaaacaaccgaaggcgttctatctcatcttcagcattgagttatgggaacgttttggttattacggcctacaaggaattatggctgtttacctggttaaacaactgggtatgtctgaagcggatagtatcacccttttctcttcctttagtgccctggtttatggtctggtcgctatcggcggctggttaggtgacaaggtactgggtactaaacgcgtaattatgctcggcgctattgtgctggcgattggttatgctctggttgcctggtctggtcacgacgccggtatcgtttatatgggtatggcggctattgcggtcggtaacggcctgtttaaagctaacccgtcttctctgctttctacatgctatgagaaaaacgacccgcgtctggacggtgcattcaccatgtactacatgtccgtcaacatcggctctttcttctctatgattgctacgccgtggctggccgcgaaatacggctggagtgttgcgtttgcgttgagcgttgtaggcctgctgatcactatcgttaacttcgccttctgccaacgctgggttaaacagtacggtagtaaaccagacttcgagcctatcaactaccgtaacctgctgctgaccattattggtgttgtggcactgatcgctatcgccacctggctgctgcacaatcaggaagttgcgcgtatggcgctgggcgttgttgccttcggtatcgtggttatcttcggtaaagaagccttcgcgatgaaaggtgctgcgcgtcgtaaaatgatcgttgccttcatcctgatgctcgaagccattatcttcttcgtgctgtacagccagatgccaacgagtctgaacttctttgcgattcgtaacgttgagcactccattctgggtctggccgtagaacctgagcagtatcaggcactgaacccgttctggatcatcatcggtagtccgattctggccgctatctataacaagatgggcgataccctgccgatgccaaccaagtttgcaatcggcatggtgatgtgttctggtgcgttcctgattctgccgctgggtgcgaaattcgcgtctgacgctggtatcgtgtctgtaagctggctggtcgcaagctatggcctgcagagcatcggggaactgatgatctctggtctgggtctggcaatggttgctcaactcgttccgcagcgtctgatgggcttcattatgggtagctggttcctgaccactgccggtgcaaacctgattggtggttatgttgcgggtatgatggctgtgccggataacgttaccgatccgctgatgagtctggaagtctatggtcgcgtattcttgcagattggtgtcgctactgccgttattgcagtactgatgctgctgaccgcgccgaaactgcaccgcatgacgcaggatgacgctgcagacaaagcggcgaaagcagccgtagcgtaaaattcagggaaactcttttacaagccgctaacttttcgttagcggctttttttttgttcagcaacgcactaccatactttaaaccacagacaaaaggagttaccgatgaaattgttctacaaaccgggtgcctgctctctcgcttcccatatcaccctgcgtgagagcggaaaggattttaccctcgtcagtgtggatttaatgaaaaaacgtctcgaaaacggtgacgattactttgccgttaaccctaaggggcaggtgcctgcattgctgctggatgacggtactttgctgacggaaggcgtagcgattatgcagtatcttgccgacagcgtccccgaccgccagttgctggcaccggtaaacagtatttcccgctataaaaccatcgaatggctgaattacatcgccaccgagctgcataaaggtttcacacctctgtttcgccctgatacaccggaagagtacaaaccgacagttcgcgcgcagctggagaagaagctgcaatatgtgaacgaggcactgaaggatgagcactggatctgcgggcaaagatttacaattgctgatgcctatctgtttacggttctgcgctgggcatacgcggtgaaactgaatctggaagggttagagcacattgcagcatttatgcaacgtatggctgaacgtccggaagtacaagacgcgctgagtgcggaaggcttaaagtaatagccatcggcccacaggtcgttgtgggccgaaatgagatatttcagagctttgttgcgctgaagtaatgttctggtttggcaatacgatcctgagcagccaccacttgcagctcatattcctgcattgctttggtggtcaccatgatttcgtagactgcagcggtcacatgttccagcgcctcctgcagcgttgccccctgaagcagtttcaccagcagtaaaccgctcgtcacatcaccaacacctaccggctggcgcataccaaaatccaccagcggacggctgatatgccaggcttcatcggcggtgaccagcagcatttcaaaacggtcacggctgtagccagctcgcgccaggtgtttaaccaacacaatttgtggcccttgcgcaatgagttcgcgcgctgccagaaccgcttcttcgacgttatttaccgcatgctcacagagtatttccagctcaaccagatttggcgcaatgatatcgctggcaggcaaaccgtgccgcacatgaaactctgcgacacccggtgcaacgatacagcctttttccggatgacccattaccggatcgcaaaaatatttcgcctgcggattcgcggctttcacctgacggacgataccgaggatatgttcaccctgctccgcgcttcccagatagccacttaatacggcatcacaggtgtgtaatttatcaatggcggcaatgccttgcacaatttcggttaaatggctgggcggcatcacgcagccagtccatttgccgtattgggtgtgattagaaaattgaacggtgttcagcggccagacgttcgcgcccaggcggcgcatcggaaactctgccgcactgttacccgcatgaccataaacaacgtgagactggatagcgagaatatttttcatcatgttccctgtataaaaaccagggggagtgatttctcactccccctttccacttaatgcattatttccagcaaatcagacagtaattctttttaccgcgacgcagtaaggtaaaacgaccaaacagacgatcttcttctttaaagaagtattcaggatcggactgtttttcaccgttaatggtgatggcattggaggcgatagttttacgtgcctgaccacgggaaggttgcagttcagaatcgaccagtgcctgcatcaggtctgcgcccttttccatctcaaccatcggtacgccgtcctgcgccagctgttcgaagtccgcttcactcagcgcactcaaagaaccgctgaacaggcattcggtaatacgttttgccgcctgtaaaccttcttcaccgtgaaccagacgagtcacctgctccgccagtacatactgggcgcgcggtgctttaccgctgtttttatcttcttcttccagggcgttgatctcttcaatgctcataaaggtgaagaacttcaggaagcggtaaacgtcggcatccgcagtgttgatccagaactggtagaatttgtacgggctggttttcttcggatccaaccagactgcgccgccttcagttttaccaaatttggtgccatctgctttagtgatcagcggaacggtcaggccaaacacctgattctgatgcagacgacgggtcaggtcgataccagaagtgatgttaccccactggtcagaaccaccaatttgcagcaccacaccgtactgtttgttcagacaggcgaagtcataaccctgcaacaggttgtaggaaaactcagtgaagctaatcccctgatcttcacggttgagacgctgcttaaccgcttctttgttgatcatctggttaacggagaagtgtttgccaatatcgcgcaggaaggtcagcacattcatattgccgaaccagtcatagttgttcgccgcgatagcagagttttctccacagtcgaaatcgaggaacggggcaacctgcttacggattttgtccacccactcctgaacagtttcttcggtgttcagcttacgctcggcagctttgaagctcgggtcgccaatcagacccgtcgcgccgcctaccagcgcaaccggcttgtggcccgcctgctggaagcgtttcaggcataacaatggaacaagatgccccaaatgcaagctgtcagcggtaggatcgaagccgcaatagagcgcgatcgggccttgcgccagtcgctctgctaacgcttcctcgtccgtcacctgggctaccagcccccgctcttgcaattgtttaatcaagttactgcttgccatcaaaatctccatgtatataacgactgcacctttgccggtacacgacttttcgccagatgcgaaagagacatagaataaagtgccagaatcaggagtaccagcgattaaagcaagatttttgcatcttttcagggtgcaagacgatcaatcttccacgcatcattttcacgctggtacaaaaagcggtcatgcaggcgatgctcaccaccctgccagaactcaatctgttcaaggctgacgcgaaaaccgccccaaaagctcggcaatggcacttcgccctgttgaaacttctgcttcagctccaggaatttactttcaaggataccgcgggcagaaatgcgactggactgcttgctaacccatgcaccaatctggctatcacgcgggcggctatgaaaatatttcatcacttcgagagtgctaagtcgttctgctttaccgatcaccatcacctggcgctcaagggtatgccacgggaacagcaggctaacgcgcggattattttcgatttgatgtgctttacggctgccgaggttggtgtaaaacaccatgcctttttcgtcgtaatgtttgagtaaaacgatgcgctgataaggctgaccatgttcatccacggtagcgaccaccatcgcggtagggtccgccagtttggcttcacaagcctgagagagccaacgttcaaaaagggttaatggatcggcgggaagatcgcggcggcgtaacccgcctttggtgtattcacggcgcagatgcgcgatttgctgcaattcgtcgttatcagacatggttttctttacggattgtcagtgggtgacgctattgtgcgccgcccctggaaaaatctcaacgctgtggattttgtaactgacagttattcaagacgatgcggtcgcgtttatagacagtcgcttcatcgcctttgctccagaaaacatagattccgtcagtgtaacgcgcgccagaggcactaatgccctgtttgagatgcagtagttgattatcgtaaacaaaactgacctcctggcgcggattattcagtttgaccgtcaacggtttttcatcacactggtattccagcgtatcggtttgcatgcgctcaaccagctgattaaaggcgctacagccggagagaaggaccggcaaaatgataattaacagttttttcatagtcatatcccgaagactttcctggtctggagggcaatacgccctccctaacgttccaagtgtaacggcagacgcggtaagaaaaattcagttaactctgatatcacgggttagcggggaaaatagcccccagtaccgtctcctggcttgcgccagtgacggaaggcagatttcctggtaatcccgccagcgtccgccaggcaagccaggcgaaagccaatgcttccatgtcatcgccactaatgccaacggcatcggtggtggtgacttctgtgcctggcagtaatgccgccagacgcgccatgagtagcggattacgactacctccaccacataccatcaatcgttcgcagccaccgctcaacaaaacttgttcagaaatggtcacggcggtgagttctgccagtgtcgcctgcacatctcggggatcaacacccggaaaatggcgcaaatggcgctccagccaaccatagttaaagtattcgcgtccggtgcttttcggtgcaggttggctgaaatacgggtcgctgagcatattttgcagcagtgggagaataactttacccgcccgtgcccactcggcatctttatcgtaaggtttaccggcctgacgccagatccaggcatccatcagcatgttaccaggaccggtatcgtagcccccaaccggctgcccaggaatgagcagactcagattggcgatgccgccaatattgagcaccattcgtcgctcggttgggtgagccagcagcgcatgatggaacgcaggtaccagcggtgcgccttgtcctcccaaggcaatatcgcgacggcgaaaatcaccgacaaccgtaattccggtgcgtgccacaatttgattgttatcgccaatctgtaaagtgtgtggtgccacgcccgtcggttcatgccagacggtttgaccgtgacaaccgatcgcaactatatctcttgcctgcagattttgttccttaagcaaggcattgaccgcatcagcaaaaagttgcccgagttgagtatcaagctgtccaaactggctaagtgtaagctgctggccctggcaaatatccagtacagcctgtttcagagataccgggatcggccaactcaaacttgccagctgtgcgacccggtgttcatcaattgtcgccaacacaacatcaacaccatcaaggctggtgccactcataacgccaataaagcggccgcttttcatagttcatcctttttcaatctgacgtttgcgcaccactcaaacataaacttttcgtgaataccatgcggaatgaccgatttttaccgttggtagtaaaacattatcttcaaatcaataatcatcatgaatgttttgtttataattggttgatcctactttcattatgatttgctcatatttggtagaacatgtaaccatggattcacatatgccatatactttgaccatgagggatgcttgcgtggcgtttcatggtgaacaggagatttttcaatgattaaacgcgtattggttgttagtatggtaggtctgtctcttgtcggttgtgttaataacgacaccctgagtggggatgtttataccgcttctgaagcgaaacaagtacagaatgtcagctatggcaccatcgttaacgtacgtccggtacagattcagggcggtgatgattccaacgttatcggtgcaattggcggtgctgttcttggtggtttcctggggaatactgttggtggcggaaccgggcgttctctggctactgcagcaggcgctgttgcaggtggcgtagctggtcagggcgtacagagtgcaatgaacaaaacgcagggtgtcgagctggaaattcgtaaagacgatggtaataccatcatggtggtacagaaacaaggcaacactcgtttctctccgggccaacgtgtcgtactggccagcaatggcagtcaggtgaccgtttctccgcgctaaataagtttgcgtgtggtcaggttactgaccacacgcccccttcatttcaccctttggcctgtaactcaatgatattatgctcaagttttgcgatgagcgtaatcagttgctccagttcctctgcggagatgccatgtaatatttccgcgcgggttttgttaataacagcttccatttcgctgatcagcggctctgccttttccgtcagtttaatacgtttagcccgacgatcgctggcacaagtttgacggctaattaaccctttttcttccagttggtccagagtacggaccagacttggctgctcgatgccaatcgcttttgccagttgaatttggctctggtctggaggtaactgatggatattgtgtaacgtaacccaatgggtttgtgttaactccagcggtttcaggcgatggtctatcagagcacgccatatgcgcaccaaccgtgccagatcagaacctagtgggctttccaatttcatctccttataattagcttgctaagatattatgcggcttttagaatagtgtgcagcaattgtattgctaaaacaaatgtattgctgcatttggttaccgtcagacatatttttcagaaattgcgcgtaaatttttcgcacttaaagaatatttattaatctaacgcaatatattcggtcgtaaaggaatctactttgtgaagtttatgctcaatgcaacaggattgcccttacaagatctggtgttcggtgcgtccgtctactttcctccgtttttcaaagcattcgcgtttggattcgtcatctggcttgtcgtacaccgcctgcttcgtggctggatctacgccggtgacatctggcatcccttgttaatggatttaagcctgtttgcgatttgcgtttgccttgctctggcaatactgattgcgtggtaactatgagtattaaaacaattaagtatttcagtacaatcattgtagcggtagttgcggttcttgccggatggtggctgtggaattattacatgcaatctccgtggacacgcgacgggaaaatacgcgcagaacaggtttctatcaccccacaggtgagcggacgtattgttgagctgaatataaaagacaaccagctggttaacgcgggggatcttctgctcacgatcgataaaacgccctttcagatcgccgagctgaacgcacaggctcagctggcgaaagcgcaatctgacctcgcaaaagccaataacgaagcgaatcgtcgtcgtcatctcagtcaaaattttatttctgccgaagaactcgataccgctaacctcaatgttaaagcgatgcaggccagtgttgatgccgcacaggcgacgctgaaacaggcacaatggcaactggcgcaaacggaaattcgcgccccggtgagtggatgggtgactaaccttactacccgcatcggcgattacgctgataccgggaaaccgctgtttgcccttgtcgacagccacagcttttacgtcattggttattttgaagaaaccaagttgcgccatatccgcgaaggtgcaccagcacaaattaccctctatagtgataacaaaacgttacagggtcacgtttccagtatcggtcgggcgatttatgatcagagcgttgaaagtgacagtagccttattccggatgttaaacctaacgtcccctgggttcgactcgcccaacgcgttcccgtccgctttgcgctggataaagtcccaggcgatgtcacgttggtgagcggcaccacctgtagcattgccgtaggtcaataatgaacgcaagcagttggtccttgcgcaatttgccctggttcagggccacgctggcgcaatggcgttatgcgttacgcaataccattgccatgtgtctggcgctgacggttgcctattatttaaatctggatgaaccctattgggcgatgaccagcgctgcagtggttagctttcccaccgttggcggtgttatcagcaaaagcctcggacgcatcgctggcagtttgctcggagccattgcggcactgcttcttgccgggcatacgctcaatgagccgtggttttttctattgagcatgagcgcgtggcttggcttttgtacctgggcctgtgcgcacttcacgaataacgtcgcgtatgcatttcaactggcgggctacacggctgccatcatcgcctttccgatggttaatattactgaggccagccagctgtgggatatcgctcaggcgcgcgtttgcgaggtaatagtcggtattttgtgcggcggcatgatgatgatgatcctgccgagcagttccgatgctactgcccttttaaccgcattgaaaaacatgcacgcccgattactggaacatgccagtttactctggcagcctgaaacaaccgatgccattcgtgcagcacatgaaggggtgattgggcagatactgaccatgaatttgctgcgtatccaggctttctggagccactatcgttttcgccagcaaaacgcgcgccttaatgcgctgctccaccagcaattacgtatgaccagtgtcatctccagcctgcgacgtatgttgctcaactggcccagtccgccaggtgccacacgagaaattctcgaacagttgctgacggcgctcgccagtagccaaacagatgtttacaccgtcgcacgtattatcgccccgctacgcccgaccaacgtcgccgactatcggcacgtcgccttctggcagcgactacgttatttttgccgcctttatctgcaaagtagtcaggaattacatcgtctgcaaagcggtgtagatgatcataccagactcccacggacatccggcctggctcgtcataccgataacgccgaagctatgtggagcgggctgcgtacattttgtacgttgatgatgattggcgcatggagtattgctagccaatgggatgccggtgccaatgcattaacgctggcagcaattagctgcgtactctactccgccgtcgcagcaccgtttaagagcttgagtcttctgatgcgcacgctggtgttacttagcctattcagctttgtggtcaaatttggtctgatggtccagattagcgatctgtggcaatttttactgtttctctttccactgctggcgacaatgcagcttcttaaattgcagatgccaaaatttgccgcattgtgggggcaactgattgtttttatgggttcttttatcgctgtcactaatcccccggtgtatgattttgctgattttcttaacgataatctggcaaaaatcgttggcgtcgcgttggcgtggttagcgttcgccattctgcgtccaggaagcgatgctcgtaaaagccgccgccatattcgcgcgctgcgccgggattttgtcgatcagctaagccgccatccaacactgagtgaaagcgaatttgaaagcctcacttatcatcacgtcagtcagttgagtaacagccaggatgcgctggctcgccgttggttattacgctggggtgtagtgctgctgaactgttctcatgttgtctggcaattgcgcgactgggaaagccgttccgatccgttaagccgagtacgggataactgtattagtctgttgcggggagtgatgagtgagcgtggcgttcagcaaaaaagtctggcggccacacttgaagaattacagcggatttgcgacagccttgcccgtcatcatcaacctgccgcccgtgagctggcggcaattgtctggcggctgtactgcagccttagccaacttgagcaagcaccaccgcaaggtacgctggcctcttaattacttaattacaccacaggcatagcgttcaccgccaccgcccagcggtttaggttgatcggacatattatcgccgccaacgtggaccatcagcgctttgtctttgatttcatccagacttttcagacgaggcgcgatgacggcatcggtagctttgccgtcattattgacgaccagtgcaggcagatcgcctaaatgcccggcaccttctggcccttcatgtttaccggtattttgtggatcaagatgcccgcctgcggattccgcggcgctggctttgccatctttggtggctggctggcagcttcctttggcatgaatatggaagccatgttcaccggggggtaatgctttcagatcggggctaaactccagacctttatcggtttcagtaatggtgacgctaccaatactctgccctaccccttggctcgtgacgaggttcatctcgactttttcactggcagcttgtgcgccggttgcaacaaccagcgccagaatagccagactaaaacgtttcataggacctccgttcattgtgcattcctgaataagtgtaaaccagtgacacatttttgaacggcggctattcctaaaagtgcttacggtacgtcgtaccccagtgccgctttacggatacgaaaccattgttgacgggtcattttcagtgtttctgcttcgacagctgcccgtacgcgctcaattttaccactaccgataattggcagcggctggcttggtaaacgtaatacccaggcgtaaaccacctgttcaatgctgcccgcgtttaactcctctgccaccacagccagttcatcacgcagcggctggaaataatcatcattaaacagacgaccaccaccaaggcaggaccacgccatcggacgaacacgcagttgttgtagttggtcgagcgtgccatccagcagtaacggctgatgcaccggggatatttccacctgattagtggcaagggtaaacggcagacgactttgcaacagggcaaattgcgcaggcgtaaagttgcttacgccaaaatgacgcactttgccgctctgatgcagatgtttgaacgcgtccgccacttcatcggcatccattaacgggtctggtcggtggattaacagcaaatccagatgatcggtcgcgagattaattaggctctgttcggcgctcttaatgatgtgatcgcggtcagtgatgtaatgaccaatgacgttttcttcacgcgcggtcgtcgcgataccgcatttactgacgatttccatccgttcacgcaggtgaggtgccagtttcagtgcctcgccaaacgccgcttcgcactgatagccaccataaatatcagcatggtccacggtggtcacgccgagatccagatgctcttcaataaaactgaccagctggcgggcggacatattccagtccatcaatcgccagtagcccatcacaaaacgggaaaactccgggccttgcggcgcaatagtaatacgctgaaccataatcgcttcctcttatcagatatgagaggagtatacgcaagattaggttcaaaagagacttggttgctccggttcgtcactactcgctggcttatttgcgcgtaatttgcgcattaatcgctgccgacaaaggcgcagcacctcttgtttttcgccatcgctcattttattccagttaaaacgctcatcacgactacgaaaacagccgcgacaaaacccgcgttcgtcagactggcaaattccccggcacgggctctggacgggaaagaactctaattgctccgccacttcgccctcctcagataagattattaccattattgaagctgttaatgtccaaagtagcaactttgcttgcactagaccgactggtctactacactccaacgcatgaacaaacacaccgaacatgatactcgcgaacatctcctggcgacgggcgagcaactttgcctgcaacgtggattcaccgggatggggctaagcgaattactaaaaaccgctgaagtgccgaaagggtccttctatcactactttcgctctaaagaagcgtttggcgttgccatgcttgagcgtcattacgccgcatatcaccagcgactgactgagttgctgcaatccggcgaaggtaactaccgcgaccgcatactggcttattaccagcaaacactgaaccagttttgccaacatggaaccatcagtggttgcctgacagtaaaactctctgccgaagtgtgcgatctgagtgaagatatgcgcagcgcgatggataaaggtgctcgcggcgtgatcgccctgctctctcaggcgctggaaaatggccgtgagaaccattgtttaaccttttgtggcgaaccgctgcaacaggcacaagtgctttacgcactgtggcttggcgcgaatctgcaggccaaaattagccgcagtttcgagccactggaaaacgcgctggcccatgtaaaaaacattattgcgacgcctgccgtttaacaggcattttttatcaccagacgaccgggagcctttatgagttctgaaaaactgtattccccactgaaagtgggcgcgatcacggcggcaaaccgtatttttatggcaccgctgacgcgtctgcgcagtattgaaccgggtgacattcctaccccgttgatggcggaatactatcgccaacgtgccagtgccggtttgattattagtgaagccacgcaaatttctgcccaggcaaaaggatatgcaggtgcgcctggcatccatagtccggagcaaattgccgcatggaaaaaaatcaccgctggcgttcatgctgaaaatggtcatatggccgtgcagctgtggcacaccggacgcatttctcacgccagcctgcaacctggcggtcaggcaccggtagcgcctagtgcacttagcgcgggaacacgtacttctctgcgcgatgaaaatggtcaggcgatccgtgttgaaacatccatgccgcgtgcgcttgaactggaagagattccaggtatcgtcaatgatttccgtcaggccattgctaacgcgcgtgaagccggttttgatctggtagagctccactctgctcacggttatttgctgcatcagttcctttctccttctagtaaccatcgtaccgatcagtacggcggcagcgtggaaaatcgcgcacgtttggtactggaagtggtcgatgccgggattgaagaatggggtgccgatcgcattggcattcgcgttagtccaatcggtactttccagaacacagataacggcccgaatgaagaagccgatgcactgtatctgattgaacaactgggtaaacgcggcattgcttatctgcatatgagtgaaccagattgggcggggggtgaaccgtatactgatgcgttccgcgaaaaagtacgcgcccgtttccacggtccgattatcggcgcaggtgcatacacagtagaaaaagctgaaacgctgatcggcaaagggttaattgatgcggtggcatttggtcgtgactggattgcgaacccggatctggtcgcccgcttgcagcgcaaagctgagcttaacccacagcgtgccgaaagtttctacggtggcggcgcggaaggctataccgattacccgacgttgtaatccaacattgcgagcggcgtaaagccgccgctatactaaaacaacattttgaatctgttagccattttgaggataaaaagatgcgtcttcttcataccatgctgcgcgttggcgatttgcaacgctccatcgatttttataccaaagtgctgggcatgaaactgctgcgtaccagcgaaaacccggaatacaaatacagtctggcgtttgttggctacggcccggaaaccgaagaagcggtgattgaactgacctacaactggggcgtggataaatacgaactcggcactgcttatggtcacatcgcgcttagcgtagataacgccgctgaagcgtgcgaaaaaatccgtcaaaacgggggtaacgtgacccgtgaagcgggtccggtaaaaggcggtactacggttatcgcgtttgtggaagatccggacggttacaaaattgagttaatcgaagagaaagacgccggtcgcggtctgggcaactaatctcctgccgggcgtgaactcatcgcgcccgcatctttactgcatcgacaagtaatatttgtcataatgcgcgctgcaatttatccgtattaagagaatcagatgtccgataacgctcaacttaccggtctgtgcgaccgttttcgtggtttttatcctgttgtgatcgatgttgaaacagccggatttaacgccaaaaccgatgcgctgcttgagattgccgccatcaccctgaaaatggatgaacaaggctggctgatgccggacaccacattacatttccacgtcgaaccatttgtcggcgcaaatttgcaaccagaagccctcgccttcaacggcattgacccgaacgatcccgatcgcggcgcggtcagcgaatacgaggcgctgcacgaaatttttaaagttgtacgtaaaggtattaaagcgagcggctgtaaccgcgccattatggtggcgcacaatgccaattttgatcacagctttatgatggccgccgcagaacgcgccagtctgaaacgtaacccgttccaccctttcgccacttttgacactgctgcactggccgggctggcactcggacaaaccgtattgagtaaggcttgccagaccgctggcatggacttcgacagcacccaggcgcactccgcgctgtacgacaccgaacgcactgctgtgctgttttgtgaaatcgtcaaccgctggaaacgtctgggaggctggccgctatctgccgccgaagaggtgtaatcgagtcgatgcctgatgacatgcaatgattcaggcatctatagtgaggctattccacgcatcctgcatgatattcacggggaatagcgttaatggcagataatccagaccctagtagcctcctgccggacgtgtttagtccggcgacccgcgactggtttcttcgcgcctttaaacagccgaccgctgtccagccgcaaacctggcatgtggcggcgcgaagcgaacatgcgctggtgattgcaccgaccggctccgggaaaacgctggcagcatttctctacgccctcgatcggctcttccgcgaaggcggcgaagatacccgcgaggcgcataagcgtaaaaccagtcgcatcctctatattagtccgataaaagccctgggcaccgacgttcagcgcaacttgcagatcccgttgaagggtattgccgatgaacggcggcggcgcggcgaaacggaagtcaatcttcgcgtagggatccgtactggcgatacgcctgcacaggaacgcagcaaactcacccgtaatccgccggatattctgatcaccacacccgaaagtctctatctgatgctgacctcccgcgcgcgcgaaacgctacgcggcgtcgaaacggtaattattgatgaagtccacgcggtagcgggcagtaaacgtggtgcgcatctggcgttaagtctggagcggctcgatgcgctgctccacaccagtgcacagcgaattggcctttctgccactgtgcgcagtgccagcgatgtggcagcatttcttggtggcgatcgcccggttacggtagtcaacccgcccgcaatgcgccatccgcagatacgaattgtcgtaccggtcgccaatatggatgatgtcagtagcgtcgccagcggcaccggcgaagacagccatgccggccgggaaggctccatctggccatatattgaaacgggtatccttgatgaagtgttgcgccatcgcagcaccattgtctttactaatagccgggggctggcggaaaaactgacggcacgattaaatgagctttacgccgcacgcttacagcgttccccgtctatcgccgttgatgcggcccatttcgagagcacctccggcgcaacctctaaccgtgtacaaagtagcgacgtttttattgcccgcagtcaccacggctccgtctctaaagaacaacgagcaatcaccgaacaggcgctgaaaagcggtgaattacgctgcgtggtcgcaacctccagtcttgaactggggattgatatgggcgcggtggatctggtgattcaggtggcaacgccgctttctgttgccagtgggttacaacgcattggtcgcgccggacatcaggttggcggtgtatctaaagggctgtttttcccccgtacccggcgtgatttagtcgattccgcagtcattgtagagtgtatgttcgcaggcaggctggaaaacctgacaccaccgcataatcctctcgacgtccttgcgcagcaaaccgttgccgccgcggcgatggatgcattacaggtagacgaatggtactcccgcgtacgccgtgccgcaccgtggaaagatctgccaagacgtgtttttgacgccacgctggatatgctttccgggcgctatccctctggcgatttttctgcttttcgccccaaactggtctggaacagggagaccgggatattgaccgcccgacctggcgctcaattgttggcggttaccagcggcggcaccattccggatcgtggcatgtatagcgtgttattacccgaaggtgaagaaaaggccggtagccggcgggtgggtgaactggatgaggagatggtatatgagagccgggtgaacgacattatcactctcggcgctaccagttggcggatccagcaaatcacccgcgatcaggtgattgtgactcctgctccgggtcgttctgcccggctccccttctggcgtggtgaaggtaacggacgtccggctgaattaggcgagatgatcggcgattttcttcatttgctggcggatggcgcgttcttttccgggactattcccccgtggctggcagaagaaaatacgatcgccaatattcaggggttgattgaggagcagcgcaacgcgacgggcatcgttccggggagtcgccatctggtcctcgaacggtgccgtgatgaaattggtgactggcgtattattttgcactctccctatggaagacgggtgcatgaaccctgggcggtggcgattgccgggcgaatacatgcgctatggggcgctgacgcgagcgtggtcgccagtgatgacggcattgttgcacgtattcctgacaccgatggtaaattgcccgatgccgcgatttttttgtttgaaccagaaaagttgctgcaaattgtccgcgaggcggtaggcagcagcgcacttttcgccgcccgttttcgcgaatgcgccgcgcgggcattattaatgccggggcgcactccgggccatcgcaccccgctttggcaacaacggctgcgcgccagtcagttgctggaaatcgctcagggatatccggattttccggtcattctcgaaaccctacgcgaatgtctgcaagatgtttatgatcttcccgcactggaacgtttgatgcgtcgcctgaacggtggcgaaattcaaatatccgatgtaacgaccactacgcccagccctttcgccacaagtttattgttcggctatgtcgcggaatttatgtaccagagcgacgccccgctggcagagcgccgggcatccgtactgagcctggacagcgagttactgcgcaatctactcggacaggtcgatccgggggaattactcgacccgcaggtcattcgccaggtggaagaagagttgcaacgactggctcctggcagaagagcgaaaggtgaagaaggattgttcgacctgctgcgcgaactggggccaatgaccgttgaagacctggcgcaacggcatacaggcagcagtgaagaggttgcgagctatctggaaaatcttcttgcagtaaaacgaatcttcccagcgatgattagcggacaggagcgtcttgcctgtatggatgatgccgccaggctgcgtgatgccctcggcgtacgactaccagagagtttgccagagatttatttacatagagtcagttacccgcttcgcgacctctttctgcgctatctccgggctcatgctctggtcacggctgaacaactggctcatgagtttagtctcggtattgccattgtcgaagagcagcttcagcaactgcgtgaacagggtctggtgatgaatctgcaacaagacatctgggtgagcgatgaagtatttcgtcgtctgcgtttgcgcagcctgcaagccgccagagaagcgacgcgtcccgttgcagccacgacctatgcgcgattgctgctggaacgtcagggcgtattacccgccaccgatggtagcccggcgctctttgccagtacaagcccaggcgtttatgagggcgtagatggcgtgatgcgggtgatcgaacagcttgccggagtcggtttacccgccagtctctgggaaagccagatcctgcctgcccgcgtacgcgactatagcagtgaaatgctcgatgaattactggcaaccggtgcggttatctggagcgggcaaaaaaaactgggtgaagatgacggcctggtggcactgcatctacaggaatatgctgcagaaagcttcactcccgccgaagcggatcaggcgaatcgtagcgcgctgcaacaagcgatagtcgctgttctggctgacggaggagcctggtttgcacaacaaatcagccaacggatacgcgacaaaatcggcgaaagcgttgatctctctgccctgcaagaggcgttatgggcgctggtctggcaaggcgtcatcaccagcgacatttgggcaccgttacgcgccctcacccgcagcagttccaacgcacgcaccagtactcgccgcagtcaccgggctcgtcgtggacgtcctgtctatgcgcaacccgtcagcccgcgggtatcttacaacacaccaaatctggctggacgctggagcttattgcaggtggagccactaaacgataccgaaaggatgctggcgctggcggaaaatatgctcgaccgctacggcatcatcagtcgtcaggcggtgatagccgaaaatatccctggcgggtttccaagcatgcaaacgctttgtcgaagtatggaagactccgggcgaattatgcgaggtcgttttgtagaaggtctgggtggcgcgcaattcgctgaacgtctgactattgaccgattgcgcgatctggcgacacaagccacgcaaacgcgccactatacaccagtggcgctctctgccaacgatccggctaatgtgtggggaaatcttctgccctggcctgcacatccggcaacgctggttccaacgcgtcgggcgggtgcgctggtggtcgtttctggcggcaaattgttactctatctggcgcaaggtggcaaaaaaatgctggtctggcaggaaaaagaggaattactcgccccagaggttttccacgcgctgactaccgcactgcgtcgcgaaccacggctgcgctttacgctaacagaagtgaatgatctaccggtccggcaaacgccgatgtttacgctgctgcgtgaggcgggatttagtagtagcccacaagggctggattggggataaagaaaggactgacggatgcccgttcgcatccgtcagtattgcaggacggattattccgcgtccggctcttcagacttgtatttagcggcagtttctttgatcagctgctgcagttcgccacgctgatacatttcgatcacgatatcacaaccgccgaccagctcgccgtcaacccacagttgcgggaaggtcggccagttagcatatttcggcagttccgcacgaatgtccggattctgcagaatatcaacataggcaaaacgttcgccacatgcggcaagcgcctggactgcctgggcagagaaaccgcagctcggcagtttcggactacctttcatgtacagcaggatcgggttttcagcaatctggcgttggattttttcgatagtggtgctcattgtcttgcttcctcaaacttctttacggcagtaatctgacattgtagcgggtcagtgcggcatcggaaaataacattttcatcacgcttttgctattttatccctttgctctatttgttgcatttcaaatattcgtttcttctctgatgccggcaaactggcgtatttataaccatttttagctttcactgctgcatttttttgcgctcgccaacgaaacgtattttttaacaataaaagctattaactttctcttcttctatgcattagaatcatcaagttttgtaaatcagacgcaggcatgatagacctgcctttacagagggacgctcagtggcgcggataaaccgtattagcatcacgctctgtgctttactttttaccaccctgcctttaacgcctatggcccatgctagtaagcaagccagggagagttctgctaccactcatatcaccaaaaaagcagataaaaagaaaagcacggcaaccaccaaaaagacccagaaaacagcgaaaaaagccgccagtaaaagtacgaccaaaagcaaaaccgcttcttccgttaaaaaatcttccattaccgcttctaaaaacgccaaaactcgcagcaaacacgccgtcaataaaacggccagtgccagctttaccgaaaagtgtaccaaacgtaagggctataaaagccattgtgtgaaagtcaaaaatgccgcgagtggaactcttgccgacgcgcacaaagcgaaggtgcaaaaagctacgaaagtggcaatgaataaactgatgcagcaaattggtaagccatatcgttggggtggcagcagtccgcgtaccggttttgattgcagcggcctggtttattacgcttataaagatttggtgaaaattcgtattccgcgtacggcgaatgaaatgtatcacctgcgtgatgcagcgccaatcgaacgtagtgaactgaaaaacggcgacctggtctttttccgtactcagggacgcggcacagccgatcatgtcggcgtgtatgtcggcaacggcaaatttattcagagtccgcgcacaggtcaggaaattcaaatcacttctctcagtgaagactactggcagcgccactatgttggcgctcgtcgggtaatgaccccaaaaacacttcgctaaaactttaccctgttgttacggcaacagggtaagttcatcttttgtctcaccttttaatttgctaccctatccatacgcacaataaggctattgtacgtatgcaaattaataataaaggagagtagcaatgagtttcgaattacctgcactaccatatgctaaagatgctctggcaccgcacatttctgcggaaaccatcgagtatcactacggcaagcaccatcagacttatgtcactaacctgaacaacctgattaaaggtaccgcgtttgaaggtaaaagtctggaagagattattcgcagctctgaaggtggcgtattcaacaacgcagctcaggtctggaaccatactttctactggaactgcctggcaccgaacgccggtggcgaaccgactggaaaagtcgctgaagctatcgccgcatcttttggcagctttgccgatttcaaagcgcagtttactgatgcagcgatcaaaaactttggttctggctggacctggctggtgaaaaacagcgatggcaaactggctatcgttagtacctctaacgcgggtactccgctgaccaccgatgcgactccgctgctgaccgttgatgtctgggaacacgcttattacatcgactatcgcaatgcacgtcctggctatctggagcacttctgggcgctggtgaactgggaattcgtagcgaaaaatctcgctgcataataactgatggcaaatgcagcattgcctgaagcgctacgcttatcaggcctacgcggatcatcgatgtaggtcggataaggcactcgccgcatccggcaagataaatcgcacgttgtcagcaactgtaacgcagaaggttatccttctgcgtttttgtttaattagctgttagcaacgcaaactgtttcaggttgttttctggcactcataaacaccagcaataatgccagtcccgcgacaatcgctcccatcaccggcacaaagctgtatcccagcccagcggaaattaccgcaccaccagcagctgctcccagcgcatttccaagattaaaggcaccaatattgacactactagacagacctggcgcttcactggcgacacgcatcacgcgcatctgtaacggcggtacgaccgcaaaggttgctgcgccccacaccaccatgctaatagctgcgccgaactcattgcgggccaggaacgggattgccagcataatcaccatcaacaacaacaaaaagcctttcaacgtgccgttaacactacgatctgccagtttgccgccgagatagttaccgatagagaatccgacaccaatcagcaccagcattgccgtgacgaacaccggtgttgcgtgggtaatactttgcagtaccggagagatataggtgtagagagtaaacattgcaccagctcccagtaccgtcgtcagcaatgcagacagcacctgcggacgcattaataccgccagctcttttttcacttcaggtcgtgcccctgcaccacctttaggtaaactgaagaacagacttaccatactaatcactcccagccccgccgttgccagaaaactcatccgccagccgatggtttcacccaaccaggtcgccgccggcacgccaccgatatttgccagggttaaccccataaacatagtggcaactgcgctggcctgtttatgttttggcaccacgcttgcggccacgacactacccaaaccaaaaaatgctccgtgattcaggctggtcaaaatgcgactaagcatcagggtcatataatccggcgcgatggcggaaagtacgttgccgagcgtgaaaattgccatcaggaaaatcaacgcactgcggcgggcacgatgagaaagtagaagcgtcatcagcggcgcgccaaccattacgccaactgcataggcactgattaacattccggcagcgggaatgctgacatccacaccgcgcgcaatgacgggcaacaagcccattgggctgaactccgttgtcccgataccaaacgcgccaatcgccagcgccagcaacggatagttaattttcatgccttatctccacctcttcgcgtcattacgcgatattcattaaagtggcgaaagcatgacagcaatcacaaaaaaatgaaaataacaaaaagagaaaacacttttgccattttgctaacaaacaggaaggagatgcgagggagaacgcgctccctcgagaggaaatcagtgcagcgcggcagtcaaacccacggctacgatcaaaccgaggacgataatcgttgttaccagtgaaaatttaaggtcggtgctcatcaagttttctccttttttattaccacacaaaaagtgatattacgcatttttacacactgtgatgaaaaaatctcccgtcatttataatgataagtgtttttaccacttccccttttcgtcaagatcggccaaaattccacgcttacactatttgcgtactggccattgaccccttcctgacgctccgtgtcgtttttccggcgtaccgcaacacttttgttgtgcgtaaggtgtgtaaaggcaaacgtttaccttgcgattttgcaggagctgaagttagggtctggagtgaaatggaatggcaacaataaaagatgtagcgaaacgagcaaacgtttccactacaactgtgagtcacgtgatcaacaaaacacgtttcgtcgctgaagaaacgcgcaacgccgtgtgggcagcgattaaagaattacactactcccctagcgcggtggcgcgtagcctgaaggttaaccacaccaagtctatcggtttgctggcgaccagcagcgaagcggcctattttgccgagatcattgaagcagttgaaaaaaattgcttccagaaaggttacaccctgattctgggcaatgcgtggaacaatcttgagaaacagcgggcttatctgagcatgatggcgcaaaaacgcgtcgatggtctgctggtgatgtgttctgagtacccagagccgttgctggcgatgctggaagagtatcgccatatcccaatggtggtcatggactggggtgaagcaaaagctgacttcaccgatgcggtcattgataacgcgttcgaaggcggctacatggccgggcgttatctgattgaacgcggtcaccgcgaaatcggcgtcatccccggcccgctggaacgtaacaccggcgcaggccgccttgccggttttatgaaggcgatggaagaagcgatgatcaaggtgccggaaagctggattgtgcagggtgactttgaacctgaatccggttatcgcgccatgcagcaaatcctgagccagccgcatcgccctactgccgtcttctgtggtggcgatatcatggcaatgggcgcactttgtgctgctgatgaaatgggcctgcgcgtcccgcaggatgttagcctgatcggttatgataacgtgcgcaacgcgcgctattttacgccggcgctgaccacgatccatcagccaaaagatagcctgggtgaaacagcgttcaacatgctgttggatcgtatcgtcaacaaacgtgaagaaccgcagtctattgaagtgcatccgcgcttgattgaacgccgctccgtggctgacggcccgttccgcgactatcgtcgttaatcacccgttgcgggagtctcttccggctcccgcagccactccttattcagcgtctcactatcgccgagatactcaagcaaccaggttaacgcagggctcatatcattttgctgccatgtcagacaacatgcgctatccggaaaggggttttccagttctaatgctacccacttcccctcattaagccacggtttggcgaaatgtgttggcaccatccctatgcataatcctgcgctgatacaggttgcgctactttcccagtcaggcacgacaactcttttttggttatccagcaaccaggtaatacgtttaggtagcgttcggctggtgtcttcgcgcaccaagctcggccagttgcgcaacgtatcatcgctgaacgggccatccatcaacgccagcgggtggtgactggcaacaacgcaactccagcttagcatccccatatcccggaaggcataacgaccgcctaccggaatcgcgcgtgttgcgccaatcgccagttccacgcgcccgtcggaaagcgcatcccagacaccgttgaacacttcctgaaagacaagaagttcgacatcatcaaaatggcgataaaaatcaacgatcatctgccgtgtacgttctggcctgacaatattatccactgcgatagctaactgaccgcgccagccgttcgctatctgctgacattgctggcgggtgatctgcatttttttgacaacagagcgcccttctttgagaaaccacgctccagcagcggtcagctccacatcacggtgccgtcgttcaaagagcggcaccgccagccactcttccagctgacgcacggtatagctgaccgcagaaggaacgcgatgcagctcctgtgccgcagcgctaaaactaccattacgcgctaccgcatcaacaacttcgagactatattcactccacatagtctgcctgcaaaatttttgaaaccagtcatcaaatattaccgtttcacaacactaatttcactccctacactttgcggcggtgtttaattgagagatttagagaatatacatgcaacctgggaaaagatttttagtctggctggcgggtttgagcgtactcggttttctggcaaccgatatgtatctgcctgctttcgccgccatacaggccgacctgcaaacgcctgcgtctgctgtcagtgccagccttagtctgttccttgccggttttgccgcagcccagcttctgtgggggccgctctccgaccgttatggtcgtaaaccggtattattaatcggcctgacaatttttgcgttaggtagtctggggatgctgtgggtagaaaacgccgctacgctgctggtattgcgttttgtacaggctgtgggtgtctgcgccgcggcggttatctggcaagcattagtgacagattattatcctagtcagaaagttaaccgtatttttgcggccatcatgccgctggtgggtctatctccggcactggctcctctgttaggaagctggctgctggtccatttttcctggcaggcgattttcgccaccctgtttgccattaccgtggtgctgattctgcctattttctggctcaaacccacgacgaaggcccgtaacaatagtcaggatggtctgacctttaccgacctgctacgttctaaaacctatcgcggcaacgtgctgatatacgcagcctgtagtgccagtttttttgcatggctgaccggtagtccgttcatccttagtgaaatgggctacagcccggcagttattggtttaagttatgtcccgcaaactatcgcgtttctgattggtggttatggctgtcgcgccgcgctgcagaaatggcaaggcaagcagttattaccgtggttgctggtgctgtttgctgtcagcgtcattgcgacctgggctgcgggcttcattagccatgtgagcctggtcgaaatcctgatcccattctgtgtgatggcgattgccaatggcgcgatctaccctattgttgtcgcccaggcgctgcgtcccttcccacacgcaactggtcgcgccgcagcgttgcagaacactcttcaactgggtctgtgcttcctcgcaagtctggtagtttcctggctgatcagtatcagcacgccattgctcaccaccaccagcgtgatgttaagtacagtagtgctggtcgcgctgggttacatgatgcaacgttgtgaagaagttggctgccagaatcatggcaatgccgaagtcgctcatagcgaaagtcactgatctatatcgatatacttatacttaggctgctaacaaaattttgttgtatgattgaaattagcggcctatactaatttcgagttgttaaagctacgataaatattatgtttttacggggacaggatcgttcccgactcactatggatagtcatttcggcaagggttcctcctttccctctgttctacgtcggattatagactcgcggttttttctgcgagatttctcacaaagcccaaaaagcgtctacgctgttttaaggttctgatcaccgaccagtgatggagaaactatgagtagtagctgtatagaagaagtcagtgtaccggatgacaactggtaccgtatcgccaacgaattacttagccgtgccggtatagccattaacggttctgccccggcggatattcgtgtgaaaaaccccgatttttttaaacgcgttctgcaagaaggctctttggggttaggcgaaagttatatggatggctggtgggaatgtgaccgactggatatgttttttagcaaagtcttacgcgcaggtctcgagaaccaactcccccatcatttcaaagacacgctgcgtattgccggcgctcgtctcttcaatctgcagagtaaaaaacgtgcctggatagtcggcaaagagcattacgatttgggtaatgacttgttcagccgcatgcttgatcccttcatgcaatattcctgcgcttactggaaagatgccgataatctggaatctgcccagcaggcgaagctcaaaatgatttgtgaaaaattgcagttaaaaccagggatgcgcgtactggatattggctgcggctggggcggactggcacactacatggcatctaattatgacgtaagcgtggtgggcgtcaccatttctgccgaacagcaaaaaatggctcaggaacgctgtgaaggcctggatgtcaccattttgctgcaagattatcgtgacctgaacgaccagtttgatcgtattgtttctgtggggatgttcgagcacgtcggaccgaaaaattacgatacctattttgcggtggtggatcgtaatttgaaaccggaaggcatattcctgctccatactatcggtagcaaaaaaaccgatctgaatgttgatccctggattaataaatatatttttccgaacggttgcctgccctctgtacgccagattgctcagtccagcgaaccccactttgtgatggaagactggcataacttcggtgctgattacgatactacgttgatggcgtggtatgaacgattcctcgccgcatggccagaaattgcggataactatagtgaacgctttaaacgaatgtttacctattatctgaatgcctgtgcaggtgctttccgcgcccgtgatattcagctctggcaggtcgtgttcagtcgcggtgttgaaaacggccttcgagtggctcgctaaaggctattctatcgccccctctccgggggcgatttcagatcaggcttctgtgcctggttgattcatggcattttctcgtgccgccagcacacgttctaccgtatctaccactgcctgagtttgtggatcgatttcaatgttgacgcgtgcgccaagttttttcttcccaagagtcgtgcgttccagtgtttcccgaattaaatggacgcaaaaacgcgttggcgtgacttcgccgacggtcaggctaataccgtcgatgccaataaatcctttgtacagaatatatttcatcaactgactatcctggactttaaaccagatctggcgattattttcactggttaatattttcgccacttcagcagtggtcataatatgaccactcattaagtgtccgccaatttcatcactgaatttcgccgcacgctcaacgtttacccaatcccccacttttaaatcgccaagattggtaatgcgtaacgtttctttcatcaggtcaaaactgacatggttgccgttaatttccgtcacggtcaggcagcaaccgttatgcgccacggaagcaccggtttccaggccgtccagcatgtggtcgggtaactccaccacatgcgtacgaaaatttggtttctcgtcaatgctcaccagttttgcggtgccctgtacaatccccgtaaacatacttacaactcctgaaatcagttaagacattctgttcagcacaatagcaggtggaaaacgcccttaccagtgaaggggtaagaatggctattttttcactggagaattaataaatcctcgctacaatagactgaatttcccctgcttcttctttttgctgcccattcaggcggctttttagtctctcatataactacaaataaaaggtgttcacgtgcagaagtatatcagtgaagcgcgtctgttattagcattagcaatcccggtgattctcgcgcaaatcgcccaaactgcgatgggttttgtcgataccgtgatggcgggcggctatagtgccaccgacatggcggcggtcgctatcggtacttctatctggcttccggcgatcctctttggtcacggactgctgctggcattaacgccggttatcgcgcaattaaatggttccggtcgacgtgagcgcattgcgcatcaggtgcgacaaggtttctggctggcaggttttgtttccgttctcattatgctggtgctgtggaatgcaggttacattatccgctccatggaaaacatcgatccggctctggcggacaaagccgtgggttatctgcgtgcgttgttgtggggcgcgccgggatatctgttcttccaggttgcccgtaaccagtgtgaaggtctggcaaaaaccaagccgggtatggtaatgggctttatcggcctgctggtgaacatcccggtgaactatatctttatttatggtcatttcggtatgcctgagctcggtggcgttggttgtggcgtggctactgcggcggtgtattgggtcatgttccttgccatggtttcttacattaaacgcgcccgctccatgcgtgatattcgtaacgaaaaaggcaccgcaaaacccgatcctgcggttatgaaacgactgattcaactcggtttgccgattgcgctggcactgttctttgaagtgacactgtttgccgtcgtggctctgttagtgtctccgctcggtattgttgatgtcgcaggacaccagattgccctgaactttagtagtctaatgttcgtgcttccaatgagcctggcggcagcggtaactatccgcgtaggttatcgtctgggtcagggcagtacgctggatgcgcaaaccgctgcgcggaccgggcttatggtgggtgtctgtatggcaaccctgacggccattttcacggttagtctgcgggagcaaatcgccctgttgtacaacgacaatcccgaggttgtaacgctggctgcgcatttgatgttgctggcggcggtatatcagatttctgacagtatccaggtgattggcagtgggattttgcgtggttataaagatacgcgttccattttctatattacctttacggcttactgggtgctgggcttgccaagcggctatattctggcactgaccgatctggtcgttgaacctatggggccagcaggcttctggataggctttattattggcctgacgagcgcagccattatgatgatgttgcgtatgcggttcctgcaacgtctgccgagtgccatcattctgcaacgagcatcccgctaataaagacaaggcgcaaccttcacgggttgcgcctgtatttttacgcaggctggagcgttgcgccaatcccgtcttcgtctggctgtaatttcagagcgttacacagagtttgccgactggcatctgttatctcaacgtgtatatccccggtaacttcccctttcacattgatgaagtcaggactaatttcttttgcactggtttgcaggcaaatcgctccctctccgcgcaggcgtttcactttcagttgcacatgcgttgccgcatcagtgatcagccacagttttccaccattcagattgatgttaccaacaatgaaagtgacactgtcaccttttaccgtactgccgtctagaatcaacacaccgccctgctgtacagtaatcgtactttgttgcagctctgcgccataaccaataatcatactagcgccgtccagtaatgcaacactcccggtcagttcaaccggtgcgcgatcttcctctacgacaaaattttcgtccgcgctggtgggactcaacaggatcactgtcccaccttgtattaccgcgttttccagcgtaccggcatgcacttcagcccgaccacccacattcacggacaggttttgcgtcttaccggaactgtagagctgaaggccatccgtccccagacgataaatggatccattctcaacaatagtgtcagagtcttcaccaccgagattattcatggtgccaccagcaagcaacgtatcactggctttcccggccagcataaaaacgccgccctgattaatctcacaattgctggcttccccacctggatacaccaacaattcaccaccttcatctaccacgaccgcactggttgtcccattaaccaacaggccgccctcttgatcgagaatgattttttccgcgcgatgtccttccagtacacgcaggttaccgccattttccagcaacaaaccgcaggcataacctttatcaacgctgaattcaccttcgggatggcggccattaaccgtagcgagcgtagagagactaattgcgcctccctcggactgaacaatatctgtggcaatggcaccatcgctgacgcttagcgtgccattgttaccgtactgtgtgcatttggcgatcccaccggttgccactttcaaccagccagcccccgtgaccacggtattttcggctcttccgccagcttcaacaatcaactcgccttcagtaagttgcgtcgcgccaatgacctcgccggtcttaacaatttgcacgttcccgtcgctcatcaagtttttcgcatcagatcccatgatttattcctttgctgcatctgtgtgcctttattgctacctaagtgtaaaggctacggaggatttatccacgacagatttgagatggtggcaaacaactctgtttaaactctgatacacgaattattgggttgtatcagatgtaaatgcgatcctgaataaaaatcacccttgcaaatcaacaaaatatagccaatttgcttaaaagctctgcaaacggtcgaaatagcgcagaaaattacgttttgcctcttgccaccttcccactctgccgctaatattcgtccccgttgtcacctacaacgttgcgttcatagctcagttggttagagcaccaccttgacatggtgggggtcgttggttcgagtccaattgaacgcaccatcctgcgtccgtagctcagttggttagagcaccaccttgacatggtgggggtcggtggttcgagtccactcggacgcaccagattttcttaatctggtcttctcctttttccctctgtttcttctctgtatccaatacgttaaaagatttacactgtcttcgtatgcgttatcagaaggagaatcgctatggcaactttgttacaacttcattttgcttttaatggcccatttggcgacgcaatggctgagcagcttaaaccacttgctgagagcattaatcaggaacctggttttctgtggaaggtatggacagaaagtgaaaagaaccacgaagccggtgggatctaccttttcactgatgaaaaaagcgcccttgcctatctggaaaaacatactgcccgactgaaaaatctcggcgttgaggaagttgtcgccaaagttttcgatgtcaatgagccacttagtcaaatcaatcaggcaaaactcgcctgacagaatttaatcaagggcggttagcgcccttttcatccctgtctgaaatttctcaaattctaaaaatctcaaccaaacttatctgataacactaaattcgaaagaatgcgtacaggtaagtaacaatgaaaaaaattgctattgtgggtgccgggcctacggggatctacaccttattcagccttctacagcaacaaactccactttctatttctatcttcgagcaggctgacgaggccggtgtcgggatgccatacagtgatgaggaaaacagtaaaatgatgctggcaaatattgccagtattgaaataccgccgatttattgtacgtatctcgaatggctacaaaagcaagaagacagccatctccagcgttatggcgttaaaaaagaaaccttgcacgatcgtcagtttttaccgcgaattctgctgggcgaatatttccgcgatcaatttttacgactagtagaccaggcacgacagcaaaaatttgcagtggctgtttatgaaagttgccaggttaccgatctgcaaattacaaatgctggcgtcatgctcgctacaaatcaggatttacccagcgagacgtttgatttagcggtgatcgccacgggtcacgtctggcctgatgaagaagaagcaacccgaacgtattttcccagcccgtggagtggcctgatggaagcaaaggtcgatgcgtgtaacgtgggtattatgggaacatccttgagcggactggatgcggcaatggcagtggctattcagcatggtagcttcattgaagatgataaacaacacgtcgtttttcaccgcgataacgcaagtgaaaagctaaatatcacgttgttgagccgcacgggtattttacccgaagccgatttctattgccctattccctacgagcccttacacatcgtcaccgatcaggcattaaatgctgagattcaaaaaggcgaagagggccttttggatcgggtatttagattgatagtagaggaaatcaagtttgctgatccagactggagtcaacgcatagccttagagagcctgaatgtcgattcctttgctcaagcctggtttgccgagcgcaaacaacgcgacccatttgactgggcagaaaaaaatctccaggaagtcgaacgcaataaacgagaaaaacatactgttccctggcgttatgtcattctgcgcctgcatgaagccgtacaggaaattgttccacatctgaatgaacacgaccataaacggttcagtaaaggccttgcccgggttttcatcgataattatgcggcaatccctagtgagtctattcgtcgcctacttgccttacgtgaagcgggaatcattcatattctcgccctcggtgaagactacaaaatggaaattaatgagagccgcaccgtcctgaaaacggaagacaacagctacagctttgacgtttttattgatgcccgcggacaacgtccgcttaaagtgaaagatatccctttccctgggctacgcgagcaattacagaaaacaggggatgaaatccctgatgttggcgaagattatacgttacagcaacccgaagatattcgtgggcgcgtagcgttcggcgcgttgccctggttgatgcacgaccagcctttcgttcagggacttacggcatgtgcagaaattggtgaggcgatggctcgggcggtcgtaaagcctgcatcccgtgctcgtcggcgtcttagctttgattaaaggtaaagctatcagcactcaacaaactgatgctgttcattaagacgatagcggactccggctcgaatattgttttcaccttcaatggcgacggcgaagcgaactctttcgccgtcatgatatgccagtgcggcgcttcctcctggcccgagaataatactgtcgaccacgcccgtgctcactaccgtactattttcaccgctggcaatgatgtgtacattgtcgccgctgttggcaattctggcgtttgcgccaaagctggcgatttgcaccaggtcaccattactggcgacatgacaccgttcacccaatgtacaaacgcgtactcgcattccggtattcgcaatccgactgctatctccagcgctgcttatccggctagaattaccggttacagcaacccgtgcgcgttcaccggagctgccaatgtgactgttaaagccgacacttccaatccgcacgctataacccatactggcaatttgcgcggcatacccagcggttgcgattctggcgttatcctcacaacagccgatgcgagcatgatcgtcgctgcgggcaaactgactgcaaaatggtctctctccggggtctgtggccagtttttgcatagaggaaacttcctgatgcgcgaagttttcatccgccagccattttttccacgcatactcaaccagactctccgcccagtccgtatatccttcctcaatcagtgcatgatgaatatcggcataactaccgccgcgtgggaaatggcgcaggaaccagcgatacatcaccgctccgatacgccattctcgcaggtctgcttgtgtaatgatcattcgttagtgccggtgatagccatcgaccatgcttttaaaggtttcgtgtggcgtacgccccgtggtgcaaagataaagatgaccgaagataaaaaagaggcttataaatgccagagcaaaatgtgtctgcaataaccagtatcttacgccaggaaacacatctcccacggcttgcggatagagacacagcagccccgtcaatagtaacaacggcagcaatccatacatgacaccaacataggcgacctgctgtaagggattaaatttagactgggttgttgccgggaaaggatgttcttccccctgcataatgccaaacaaataaaatcgcgtttgttttgccgctcgttccagccacccctgacgacgaatgcgatagtggtgaccattatccccaacggcattgatcagcacaaagccgagccagcatgccagtaacaaaaatccgcaaacttcatgcaccgcaaccagacttttaaccgcagttgcgcccaccatcgcaaagtgatttatcagcccactggccagcaacaatacaaagagtaacgcattgctccagtgccataatctgaccgctttgctgtaaagataaatcttctcaccatgatcggtggcacttttcttcacgccacgagcacgaagcaaggcatgcagccccagcaccaaccacatcccaaccagcaatactccggcaatgatcaaccacaccggccaaaattcgggagtgaactgtggcacatagttcgctaactggctctgaaactgttcagcatgttggctcgggttcatacattttcctttttaatcaaatgttgaccgaaccggcgatacagatgcggtttcccggcaccaggtagctgatattgatagtatttattttgctgcaaccacgcctgaatttctgggctatcttcgcgaccaaagatcaatgcgtgttccgggcaggcgctgacgcaaatgggcggaaagccttttgccagtcgggactcagcgcagaaatcacatttatctgccactttagtgacagggttaaggtagcgaacctggtacggacaagcgccaatgcaataactgcagccgatgcactggcttttttctacccgcacgatcccctgctcatcacgccagctcgcccccgtcgggcaaacgtcgatgcacggagcatcttcgcagtgctgacaactctggcgaaaaaagtgatactgcgtttcgttgtcgttatcggtgactggaatgtgtgctatgcttaaacggcttccctgagcggggacgtggttagttttacggcatgcgcgggcgcaaatattacagccattgcaccgactctcgtcatgaatcatggcataccgaacttccttttcttgcctcgtgttcgctaacagagaagacgcagaaccagtaaaaaagattactgttcccatccccagaacaaatttgcgtcgagtgaaggacatctgattatcccctaatgcagtggctgcaactgtccaccctatccatgacatctccctgaaatttcaggggttctgaaactgctctacctcgaaccattcgcataagccataagccttgccataggtcataaatcgctcgctaaacaagtacaacaccgccgtgctactctccacctgccgtatatcggcatattcaggtgcaacatccatcgcggcgatcgcggcttcaatctgcgcttcctggaagtaatatggcgcttgcatcagcatggcgactttgtaaggacgaggatacgtctggcactcaaaacgaacggcgtgtgcaatggcgcgacaaatgtcctgctccacaacttgcaaagacatcgccgcgtagttttcactcatggcctgcgtactgtaatagtaatcatccttgcttcccgtcaaacaagcgatatccgcgtagtctccgttctgcttaatgctttccagcaaaacactcagttcctcttctgcaaccaaatagggtgggctgagaaacacggcgcgcgccaccagctgcccagccgcagaatgctggcgaatgaactcagccaggatttcagcaggttctggttcggttaccgtatcaacggggtgacgcatcccctgcaaccattgccgcttcgcctcgtcaacttcgctgactttcgctaacggcaattcatcctgatggttcatcttacccattccttacgcaggcagtagattgtgtgctgccagatcggcggcaatatcttccagccccagacgctgcaatgtttcgcgggttggacaaccaagctgtgggtcccagcccatttctttgtagaacatcgtgaggctagcatgcatatcgtcacgatccattttgtcagtaccttcagtaaagaccgggatctgcggatccttgtcgaatacccaggaacagataagatcgtgttcattacgcatatctttggtttgcatcagttttaccgtgtaggcacgatgcaacgtaaaaatacgctctgcagctaaatctaatttttcctgagtcatctcttcgccggtgatcgctttgaagaatttggcttcaagcgccagatcgccccggtaattacggcttttcagcgggctaacggtcattggccagacccagttgcacagggtgacggcgttatgcaaacagacccgcaacaggctccactttgcatatttaatttttgcgtcattgattggcgtgtagtttttggtttcatcgtaagcatcttcagaaccaaaaagttctttcgccacttcacgttgcagtttcaatggcaagccggaaccaataaagttgatatgggtatgcgtcatgcagtcacggttgaacatacagttaacaatggaaccgacctgcgcactcgcttcattggcatggtgaaccggatagccaaacgggctccagagtttatttttcgcgtagccccagtactcttcacccaaattccagcgttctgcgatggcataactaccatcagccaggtgactcagctcacccacacgatgcgccagacggtagtaaaaatctttaatgaagttaacgtcacccgcttccagttgatcccagcgaatttctgcatactcttcagctggcagaacacgcttgaacacacctttgctgtaacaataagtaaagtcgcgatgcaactgcccgtagttacaccataggccgtagtcatcgaacaaattcagacccaccaggttaccaatcacacgaccatcgtctttatcttcaaaatctttcggcccgttcgggaagatggtggtatggacaaagtttgctacacaagtgttaccacctgtgctgggcacgccaaactctttcacccgaggaatattcatttgggtcatacaacggatcgggcaagagtggcagccgctcatttttactgtgtatttctctgccgccggtcctaagtcaaaaacggatttataggtacgaaagccgaccgtattctgattgcctggcggaatttcacccgtttcaatcggaccaccttcagccgcgccccaaaacagccctttacgtgctgtccagcgactcttgggatcactatactctgcccagctttgtggcgtacttggcacgacatggttgttattcgcaccaataagttcagtcatcatgtaatcattgagacgcttcatctcctgacgatcggcaatgttgacccctttcgtcccttcaaccgcaatcgctttcaggtttttgctacccattattgcgccagttcccgcaccgccgctgtggttacggctattcaacatgccagagagaggaacaaggttttccccagcctgaccaatagccgccacacaggtttccggactggtcaatcgacaaatttcttccgtcgttgcgcgcgtcccttttccccataagaaatcggctttttccaggctaactttgtcatctttaatcttcagccataccggacttttcgccttcccttcgataataatgacgtcgtatccagcgaatttcatttgcgctgcaaaaaagccacccatatgggcatcgacgactaaatttcctttggtaaaagtagaaagactggtgatatttacgcgagaactacagggggcaccagatccagttaatgggccggtagcaaagactaatttattcgcttcatcgaaaggtttcgtgcctggcggtacttcgtcatacataattttgtagccgaagcccatgccaccgacaaaacttttaaacttactggaatcttcgagggtaatatttcctgtcgtgagattgactcttaatatattacctgtccaaccgttagccatgattttttcctttgcaagattcacacagtaatatctttccactcgataatttttaacgcccctgttgggcaggcgtttgcgcattcaccgcataacacacatttgctggattttttactttcggtatttacggtggccatcatccacgggcatgccgtagtacaggcgctacagccaatacagcgtttatgatcgacggtaatacagccttctttctgctgccaggtaatcgcaccaatcgggcagacgttcatgcattgcggctctttgcattgacggcaggtgtccgcggtatagttgagatcgccatacaggccgccgccagagccaaccccgttgtcgccaaagaaataattgcgatggattttgatacgggagaagaatgtccctacactgccatcgttgaagttggtacaagagatttcacagcggtggcaacccgtgcatcgcgctcgctgggtcaccagcacccctttgggggtatttatcaaccctactgtgccgctatcaatatcttcctgtttgcaacccaaaagactcagtaacgcaggggcaattgttagaccagcaaggccttttccacttatacgcaagaattctaatcgcgttaagccaatatctaatagtggacgatcaaccgggttcatttatttcgcatcctcttcgcaaacacagtgctgacaattcagcagcctgatattaagcattcaactaatacgctgctgactctgtccccaacaccagatattttccctaacccgatagtgtatgagaaaagattaacgccgataaactaatcctttatggttaggagaaaaaataatgtgattattctgagcccttaacattgatcgttatcaattaaaattacaaagcaagaaattataagtgaactgatatttattatcatttgaaataaatttaacttaagcgacaattatttgtgactttcattgcagaaaataaaaataacattatcgctataaattaaaatacataccgaaattcgtataatttcagcagttgttatttagaatgattaactggaccgcaactgaagcaagaatatcaggatgaagcttaccgcctcatcctgaatggtcattttaccagtgcgttaatgacggtttccatcgcctgcttttccagctcactgcgctgaatgcgtttattggctaatgctgtacgtaatacgcctgcgataacaatatgctttggttcctgccccagatcgcgcatttccagcacaactttaccgacaactctgcacatttctcggtacagttcatcctcttttgtccgatttcccattctttatacctatttatcatgccaactatcagcatatatcaatctaaccaattaaacaaaaatcaaacaaaatcagacaaataacgcgataaattattttaactgtagcaattgagcgatgatatatttatacaccggatgaactttcacttatcctcacactgacaacttcggcaccagacgttgcgcaaacagtgaagtttttgcgtaaccttttccctggaacgttaaatctttgataacaatttattgtctaacaagttgtatattttttgaaacgctgtttttgttttccttttggattaatttcagcgtataatgcgcgccaattgactcttgaatggtttcagcactttggactgtagaactcaacgactcaaaaacaggcactcacgttgggctgagacacaagcacacattcctctgcacgctttttcgatgtcacctatccttagagcgaggcaccaccactttcgtaataccggattcgctttccggcagtgcgcccagaaagcaagtttctcccatccttctcaacttaaagactaagactgtcatgaaaaagaccaaaattgtttgcaccatcggaccgaaaaccgaatctgaagagatgttagctaaaatgctggacgctggcatgaacgttatgcgtctgaacttctctcatggtgactatgcagaacacggtcagcgcattcagaatctgcgcaacgtgatgagcaaaactggtaaaaccgccgctatcctgcttgataccaaaggtccggaaatccgcaccatgaaactggaaggcggtaacgacgtttctctgaaagctggtcagacctttactttcaccactgataaatctgttatcggcaacagcgaaatggttgcggtaacgtatgaaggtttcactactgacctgtctgttggcaacaccgtactggttgacgatggtctgatcggtatggaagttaccgccattgaaggtaacaaagttatctgtaaagtgctgaacaacggtgacctgggcgaaaacaaaggtgtgaacctgcctggcgtttccattgctctgccagcactggctgaaaaagacaaacaggacctgatctttggttgcgaacaaggcgtagactttgttgctgcttcctttattcgtaagcgttctgacgttatcgaaatccgtgagcacctgaaagcgcacggcggcgaaaacatccacatcatctccaaaatcgaaaaccaggaaggcctcaacaacttcgacgaaatcctcgaagcctctgacggcatcatggttgcgcgtggcgacctgggtgtagaaatcccggtagaagaagttatcttcgcccagaagatgatgatcgaaaaatgtatccgtgcacgtaaagtcgttatcactgcgacccagatgctggattccatgatcaaaaacccacgcccgactcgcgcagaagccggtgacgttgcaaacgccatcctcgacggtactgacgcagtgatgctgtctggtgaatccgcaaaaggtaaatacccgctggaagcggtttctatcatggcgaccatctgcgaacgtaccgaccgcgtgatgaacagccgtctcgagttcaacaatgacaaccgtaaactgcgcattaccgaagcggtatgccgtggtgccgttgaaactgctgaaaaactggatgctccgctgatcgtggttgctactcagggcggtaaatctgctcgcgcagtacgtaaatacttcccggatgccaccatcctggcactgaccaccaacgaaaaaacggctcatcagttggtactgagcaaaggcgttgtgccgcagcttgttaaagagatcacttctactgatgatttctaccgtctgggtaaagaactggctctgcagagcggtctggcacacaaaggtgacgttgtagttatggtttctggtgcactggtaccgagcggcactactaacaccgcatctgttcacgtcctgtaatattgcttttgtgaattaatttgtatatcgaagcgccctgatgggcgctttttttatttaatcgataaccagaagcaataaaaaatcaaatcggatttcactatataatctcactttatctaagatgaatccgatggaagcatcctgttttctctcaatttttttatctaaaacccagcgttcgatgcttctttgagcgaacgatcaaaaataagtgccttcccatcaaaaaaatattctcaacataaaaaactttgtgtaatacttgtaacgctacatggagattaactcaatctagagggtattaataatgaaagctactaaactggtactgggcgcggtaatcctgggttctactctgctggcaggttgctccagcaacgctaaaatcgatcagctgtcttctgacgttcagactctgaacgctaaagttgaccagctgagcaacgacgtgaacgcaatgcgttccgacgttcaggctgctaaagatgacgcagctcgtgctaaccagcgtctggacaacatggctactaaataccgcaagtaatagtacctgtgaagtgaaaaatggcgcacattgtgcgccattttttttgtctgccgtttaccgttactgcgtcacgcgtaacatattcccttgctctggttcaccattctgcgcactctctacactaggcgcattgctggctgcgggagttgctccactgctcacgctaaccggataccctgcccgacgatacaacgctttatcgactaacttctgatctacagccttattgtctttaaattgcgtaaagcctgctggcagtgtgtatggcattgtctgaacgttctgctgttcttctgcgcttagtggtcgatgtacttcaacataacgcatcccgttaggctccacggaatatttcaccggttcgttgatcactttcaccggcgttcccgtccgcacgctggagaacaaggctttaatatccggtgcattcatgcgaatacacccactactgacgcgcaaaccgacgctgtccggcgcactggtaccatgaatgaggtattcgccattaccatgcgcgaggcgcagtgcgtaacgtcctagcgggttatttggtccggcaggaacgactggcggtaatttaatgccacgctccaggctacgctgacgaatgcctgccgtaggcgtccaggttgggttagggattttctgcccaacacgcgtttccatcaccggcgtttccagcccctgcaatccaatacctattggataaacctgcacaatattttctcccggcggataataataaaggcgcagctctgcaaggttaacgataatcccctgacgcggtgcatcaggtaataacagttgactaggaatagttatcgtcgtaccaggttttggcaccggggcgatagtgttattggcttcaaggatcaacattgccgcagtatcaaaacgtcgggcaatagcctgaaggtttttatccccttcttgcaccgtatacgtttgattttgcccaaccagtcggcttccggttggtggtagcggataatcaaccgcccaggcagcctggatggcgctaaaagcgccgataagcgtgagtgtaagcaaagacgcgcgtttcattgtaaacctcctgtatttgccggagactcacgctgaaacgtcggatggcgcttatgttcacctgaaaccaaaacactcctgtgcaggtcagtgtaaacattgaccatccggcaatgtgagccaaccggatgaaagctgtccttttagtttagctaagtgcagcggctttggcgcgaattgcgcgaatcatcgcttccagaccttgactacgagatggggtgagatgttgggtgagcgccattttttcaaaccacggacgcacatcgaaattgacaatatcctgcggcgtcatctgatcgtagagaataaagacgaccgcaataagccctttcacaatcgccgcatcgctgtcgccctgtaattcaataattccctgggcattctggcgcatgacaatccacacctgactctgacagccctgaatgctattttgtggacttctgtcttcgtcgcgtaattctggcagacgctggcccagctcaataatgtagagatatttctcttcccagttggcgcagcgtaaaaaattacgcagcaacttttctttatccggcaataaagccatagtgcctccctgttatcccagcaaacggtgaatacgttgcaggccggtcaccagacgatccacttcttcatgggtgttatacatggccaggctcgcccgacacatcgcagggacgttgtaataggccatcaatggcattgcgcagtgatgtccggtacgcacagcaatgccgtaattatcgagaaaactgccaacatcataggcgtggtgtttaccgagattaaaagcaataacgccaagcctgttttgtgggccatagagagtgagatccggtacagattccagctgacttagcgcataatgcatcagattctgttcatactcggctatgttattaagccccagcgcgctaacatactccagcgccgcgccaagaccaatgatgcccccggtattgggtgtaccggcttcaaaccgccatggtgctttggtccaggtagtgccttcactcaggctgacggtggcgatcatagaaccgcccccttcccacggcggcatctcctgcaacaaggcttctttcacataaagaatgccaattccggtggggccatacagtttatgcccggagaacacgtaaaagtcgcaatccagcgcctgaacatccaccggatgatgcatcaccgcctgagcgccatccaccagcacttttgcgccatgctggtgcgcaagcgtgatcatttccgccagtggattttctgtgccaagcacgttggagacatgagtaattgccagcaggcgagttttctcatcaaacagcgtaggcagcgtctccagttgcaacgtaccatcgggattgagcgggatcacacgcagctctgcgccaacgcgtgcgcaaagcatctgccagggaacaatgttagcgtggtgctccatctgactgatgatgatgttatcgcccgcccgcacgttgctgttgccccagctattggcgaccagattgatcccttccgtcgtgccgcggacgaacaccagctcttccgcgctacgggcattaataaacaggcttgcccgcttgcgcacgttctccattttctcggtcgcctgggcgcttaaggtatgaataccacgatgcaccgccgcgtagccatgacgataaaactcggcctcggcgtcaatcacctggctcggtttctgcgcactggcggcgctgtcgagataagccagcggcaaaccgtttacctcacggctaagcaccggaaagtcggcccgcactttgtcgacggaaaaaatcatcttgcacctcctggcagccgttgaccgattcgggccagcacctgctgtttaagcccctcatcacgcagtgcttccgtcagttcggcagcgaaggcgtaaatgatcatctgctgggcatcctgctgattgatcccgcggctgcgcagatagaatatctgttcatcatcaatacgccccaccgtcgcgccgtggctgcatttcacatcatctgcatagatttccagctgcggtttcgtatccacttccgccagtttgcccatcagcagattgttgttggtcatctgaccatccgttttgatggcgtgctgcgcgacgttgatcaaaccgttaaataccgcgcggcctttgtcgctgacgatagttttgtgcaactgtcggctgttacaaaaacctttattgtgttccagccaggtacgggtatcacacacctcgtttttcaccggcatcgccaggctattgatccgcagcgtgctgttttcgccattgagttgcgtactggtgttgtgtcgtaacactgcgccacccagcaggaaactgtggctaaatgcggtggcatcctcagccagcaacaaatcgttatgagcaaagtggtgactgagcgggttttcaaacgccagcttgatatgctgcaagtgggcattcgctgcgacgttgatagtgaaccgtgccccggtaaaatgacgagcatcattcaggctgacaaaatgttcgatcaccgttgcttcggcaccttccgccagatccagatgatgtcggtaatgggcagtgttcacctcttcacctgccacgccctgggtgatatgcattaacagcaatggctttgccggccgttgaccgcgcttcacggcgatatgcgtcacgctttgtgccaggctttccgtcaaatgcagaaacacttccgcctgaatagcgtcgggtaaaccctgacggtcgtcgttaatgctcacttcatatccgctgccttcagttgcatcgctcagtgcgggcacgtaacgcccatcgacaaacaccagccgcacggagtctaacgttaacgctaaggcatcacgctgctgtggggatatctctcccgcaatgctgacaaactggctattgatcagcccttccagcggcgtatatttccagttttcatgtttacgtgtcggcagtccggtacgcagcaattgttgtaaatgctgctgtgcttgcggggagcgttttgtcccttcagcttcaaacaagtgatgccactgttgcagcgcgttactgctgttcggtaagccagccataaccctgctcctccagttgtttgaccaacgtgaaatcgccggatttcacaattcgtccctgatatagcacatgaacgtaatcaggcttgatgtagtcgagaatgcgttggtagtgcgtaacaatgatgaaactgcgcttgccatcacgcaggctgttcacgccatcggcgaccacttttaatgcgtcaatatccagcccggagtcgctctcatcaagaatgcataactccggttccagcaccgccatttgcaaaatatcgttgcgctttttctcgccgccggaaaaaccaacgtttacgctacgggttaataaatcttccggcatcttcaggagagcgattttctcttccatcaaatcctgaaaatcaaagcggtcgagcgtttcctggccgcgatagctgcgcaccgcattaagtgccgtttgcaggaaaaactggttactgacacctggaatctccaccggatactggaaggccataaagatgccttcgcccgcgcgatcttccgggctcagcgcaagcaaatctttgcctttgaactcaaccgtgccgcccgtcacttcataatcttctcgcccggcaagcgttgcgcttaaggtacttttgccgctaccgtttggccccataatggcgtgaacttcgccgggatgaacgtcgaggcttaatccgcgcaggatagctttatcttccacgctgacgtgtaaatctttaatacttaacatgtttattccttatccgacgctgtgttcaagactgatggcgaggagtttttgtgcttcaacggcaaattccaacggcagctcgctgaacacgtctttgcagaaaccgttaacaatcatgctgatggcgtcttcttcgctgatcccgcgttgcaggcagtaaaacagttgatcttcaccaatacgacttgtcgttgcctcgtgttccagttgcgcactattgttacgacactcaacatacgggaaggtatgcgccccacaattagcgccaatcagcatactgtcgcactgagtgaaattgcgcgcattggttgccgtcggcatgattttcactaagccgcgataactgttctgactatgtccggcagagatccctttgctgataatggtgcttttggtgtttttaccgatgtggatcatcttggtgccggtatccgcttgctgatgaccgctggtcagcgccacactgtaaaactcaccaatggagttatcgccgcgcaaaatgcagctgggatatttccacgtaatcgcactcccggtttcactttgcgtccaactcattttgctgttttcgccttcgcacaaagcacgcttggtgacgaagttgagaataccgccggtgttgttatcgccaggaaaccagttttgtaccgtggaatatttcacctcggcgtttttatggatgatgacttccaccactgccgcgtgtaactgatagctgtcacgcaccggagcggaacagccttcaatgtagctgacgtagctgtcttcgtcggccaccagaatggtgcgctcaaactgcccggttttttctgcgttaatgcgaaaataggtggaaagttccatcgggcagcgcacgcctttaggcacataaataaacgtaccatcagaggctaccgccgcattaagcgcggcaaagaagttgtcattccccggcaccacggtgccgagatatttacgcaccagttccgggtgatcgtggatcgcctcaccaaaggaacagaaaataattccctgctccgccagtttttcgcgataagtagtggcaacgctaacactgtcgaaaatggcatccaccgccacctctttgccttcccgcacgggaacgcccaactgctcaaacgccgcctccacctctttacttaaaaaggcgttcgcgccagtttgctgcaccgcgccaggttcagacgcgcaagtgtcgtcacaattaccgcagcttggtgcactgtagtagctgtaatcctgataattcagcttgtcgtagtgcgctttcaaccagtgcggttcttccatctccagccatgcgcgataggcgtttagacgaaactccagcatccactccggctcattacgcttcgcgctaattgcgcgcaccacctcttcgtttatcccctttgccagctcatcggtggctaactgggtgaagaatccttctttataattcagcgggccgccggtccaggttttgacatcgtcagttgcttcagtattacgagacatagtaccgcttataccccaaagctttcgccacagccacattcattctgggctttagggttgtgaaatttgaatatctgattaagtccttcacgaacgaaatcgacttccgtgccatcaataaacggcatcgcttgcagcgggacaaacagcttcgcgccgtcgtgttcaaacagcagatcgtctttgtccggctcgctaacactgtcgagcacatagccaaagcccgcgcagcccgtttgcttcacgcctaagcgcacgccgaccatacccggctgctttgccaccagctcacggatgtgtatcgccgctgcgggtgtcagcgttaagccttgccaggcgaaatcttgtgggttaaaggttccactatgcatgtccatcgatttacctcacttcatcgctttcagcgtataacagcatgttagtgataatgattatcagttcaacccagcaaacgcaggggctttaccgtaaaacatgctttttgcctgcttttaataagcatagaccctgatgtgtgggttaacaggcacgctaagaattaggtatctcattgttagataatggttattatctaaggagcattaaggctgtgatgaaaaagaaaaagttgtattgaaaatgactatttaagagataggtaaaaaagtgcagcgttcagaaataagaaaacccttaagtctgtgcgacacaggcttaagggtttctaccccatccggcgcttatctccggcactctcagtggcttagctcttgaaggggcgataagaataatctcataaagctaacccgccgttttaacacaaactgcgattagtattatttttgaacaatatcaggcggtagataagcagtattaagaaggtcatcgaacctggacggaggttaatccaggtcgatttggcgaacttgcggcattaagtcaggatcaatgcacgcccagacgccaggcaaagtagatttcttcttttaattcagcagaagagagagtaagcaggtcagcaaattcaagttctagttgtttcagacgtttgagatattgggcaggactaagattgctctggtcacggcgtaaaaattcaatggccagctgggtgggatcaagttgagtagacatagcatcctcgcttttagacaagacctgcacagtataccaccgtttactgtgcagataatgaccaaaagcaatatgcgtcacacttttctggtgacaacgtcacaaaatggcggtcgtcaatcgactgctacagcacaaacgccctttctcatcgaagatttcaatctgccagacctggtgacggctaccgagatgcaacggtttgcatacgccgcgcacccgcccttctcgtgcgctgcggacgtggttagcattgatttccagaccaaccactttttgctcaccttcggtacataaataaccggcaacggaaccgatactttcggccagtaccacggatgctcctccatgcagcaacccgaaaggctgctttgtccggctgtctactggcattgtcgcttcaagggtgtcatcaccaatatgttcaaagcgaatatccaggaaccccaccatgtttccttcacccatagcattcagtgcttccagggtgattttccgtttccatatcatttaataatctccagtaaagcctgcacaggatggcgtacccccgtgccttcaacccgttttacctggctacggcaggaatatccggtcgccagacagcggttacgcggcagtcgctgcatagcctgatgccaggataactcatagatcccgaggctattttcatggtttttcgcttcatgtccgtaagtccctgccatgccgcagcaacccacgctgacattttccagtttcgcgccaaaacgggcaaatatcgcggcccattgtgctggcgcacccggcaaggcggtaacttcggtacagtgaccaaagaaataccaactttcaccgctgactgtagccactggctgactctcaagtgcgcttgccagccattcattcgccagtaagacgttaaactcgccacgctcctcgcccagcgccagtttatattcatcgcgataacaaagtaccagcgccggatcgacgcccaccattggcatacccagcttcgccatacggttgaggaaatccgccgtctttttcgccgtcttcgcaaaacgattaagaaaacctttaatatgctgggctttgccatttgggctaaatggcagtaacacaggctggaaacctaatttttcgaccagacggacaaaatccgccaccacttgcgcatcgtaatagctggtaaaggggtcctgcaccaccaacactgtgcgcgctttctgctctgcattgagagattcaagctgttccagcgtcatgtttgcgctgcgatgccccaccatttgttgttgtaggctggggacgctcagcagcggcaaatcaaccatgccgatatgtttttcgctgagtttgcgcaccagcggctggttaatgaagaagttaaaggttttcggcgcgcgtgccatcagcggcgcgtagctctcgaccgtagcgacgaggtggtcgcgcagcgggcgtaaataacgggtgtgatagagctgcagaaaacgagagcgaaactccggcacatcaattttgatggggcactgggtgctacacgctttacaggccagacagccgctcatcgcctctttgacttcgtgactgaagtcatattcgcctttattcgcatgccagctattgcgcgtgcgggcaattaacgtccgcaaactgacgccggattcaggcagttcttgttccagtttgagtggatcaacgccgcgatccgccaacaaacgcagccattcacgcaccagcgttgcgcgccctttcggactatgaatccggttctgggtgatcttcatgctcggacacatcggactacgggcatcaaagttgaagcataaaccgttgccgttacactccatcgcaccgcgccactgctggcgtaccgcaatggggatctgccgatcgaatgtaccgcgcttcaccgcgtccactttcatcatcggcgcatcgagaccttctggcgggcaaatcttccctgggttgagtcggttatgcgggtcaaatgccgctttcactttgcgcagttctgcaaaaagttcctcaccgaaaaacgccgggctgtattcagcgcgaaaacctttgccgtgctcgccccacaacaaaccaccgtatttcgcagtcagcgccaccacgtcatcagagatttgcttcatcaaaatctcttgttgaggatcgcacatatccagcgctggacggacgtgcaagacacctgcgtcgacgtgaccgaacataccgtagcttaagccgtggctgtcgagcagcgcgcgaaattcagcaatataatccgccaggtgttccggcggtacgcaggtatcctcagcaaacggaattggcttagcggcacctttggcattgccaagcagaccaacggcttttttgcgcattgcatagatacgttcaacccccgccagctcacggcacacctgccagccgatgacacctgcttgatgactggcgatcagctcatccaaccgcgcacagagtgcatttacccgctcatcaatcagcgcctcatcatcaccagcaaattccacaatgttcagcccgagcatctcttggtcaggcacatcggtaatcaactcgctgacggaatgccagacaatatcttcccgcgccagattcagcactttactgtccaccgtctctacgctaagcgcccgcgcctcaaccataaacggcgcgttacgcagcgcagagtcaaaagagtcatatttgacgttcaccagacggcgcactttaggcaagcgtgtaatatccagccgcgcttcggtaataaaggccagcgtcccttcactacccgtcagaatgcgcgtcaggtcgaactcggtcatctcatcgttaaagacatgacgcagatcgtaaccggtaagaaagcggttaagtttggggaagttgtcgataattaactggcgttgctgacggcaacgttgataaaccgtgttataaattcgcccgattgtggtattggatttacccagcgtttccgccaattcgacgggtaaaggttgcgtatcgagaatatcgccccccaacaacaccgcgcgtacgccaagtacgtgatcactcgttttgccatagaccaggcttccctgaccggatgcatcggtattgatcatcccaccgagcgttgcccggttgctggtgctaagttccggcgcaaaaaagtagccgaacggtttcaggtactgattgagttgatcttttatcaccccggcctcaacgcgcacccagccctcttcagggttaatttcgatgatgcggttcatatggcgggacatatcaacaataatcccctggttgagcgcctgaccgttagtgccggtgccgccgccgcggggggtaaagatcaggctactatagcgttcctgcgcggcaagacgggcgatcagcgccacatctgcggtactacgcggaaataccaccgcatcggggagaagttggtaaatactgttgtcggtgctcattgtcagacgatcggcataacttgtcgccgtatcgccggtaaaaccttgttgctccagctcttgcaaaaaattaagcaccagttgaacgacgccgggtgcctgggaaatctgtggaatcattatattgaccctttcctgcggtctgtgatgtaggtcgatacactattctttcaggctgctgcaatagcgcactgaaaggtgatgtttgtttactctatggatttcgtgttgcaggaaggcggcaagcgagtgaactccaggagcttacaatagtaagtgactggggtgaacgaacgtagccgcagcacatgcaacttgaaatacgacgagtaaatcgtttgcgtgttgcctgagttgttgtaccacatttttttctaacacgcccatcagaattaagggcagaatcggcctgttaaaaaccgctgaaattgctcatcattatgcaggtgagtttcgcgtgttcacgtcgcgtcgacgatttgacgcacaaaaaaggtgaaaagtagttatggtaaatgttcgtcagcccagggatgtcgcacaaattctgcttagcgtgctgtttttagccatcatgattgtggcatgtctgtggattgttcaaccctttattctcggctttgcatgggccggtacggtggttatcgccacctggccggtattgttacgtttgcaaaagatcatgtttggccgccgctctctcgccgttctggtgatgacgctgttattagtgatggtgtttatcatccctattgctttgctggttaacagtatcgtcgacggcagcggcccgctaattaaagccatttccagcggtgacatgacgttacccgatctggcgtggcttaataccattccggtgattggcgcgaagctgtatgcaggctggcacaacttgctggatatgggggggacggcgatcatggcgaaagtccgcccttatattggcaccaccaccacctggttcgttgggcaggcggcgcatatcgggcgctttatggtgcattgtgcgctgatgcttctcttcagtgccctgctgtactggcgcggtgaacaggtggcacaaggcattcgccattttgcaacccgtctggcaggcgttcgcggagatgccgccgtgctgctggcggcacaggctatccgcgcggtggcgctgggtgtggtggtgacggcgttagtacaggcagtgcttggcggtatcggcctcgccgtatccggcgtaccttatgcaacgttgctaacggtgttaatgatcctctcctgccttgtccagcttggcccgttgccggtactgattccggcgattatctggctctactggactggcgataccacctggggaacggtattgttagtgtggagcggtgtggttggcacgctggataacgtcatccgcccaatgttaattcgcatgggtgccgatttaccgctgatcctgattctctctggcgttattggtggtttgattgctttcgggatgatcggtctgtttattggtccggttctgttagccgtttcctggcgtctgtttgccgcgtgggtggaagaagtcccgccgccgacggaccaaccggaagaaattctcgaagaacttggcgaaatcgagaaaccgaataagtaatttctcatcaggcggctctgccgcctgattgttaaccaccgctaattgatatttgcttgctcttccccatattttcctgcttaccgccattcagctggtagtacctgtcgcaaattctttacagtttttaaactaatgagacgaatctgatcgacgcaaaaagtccgtatgcctactattagctcacggttataaatcaacatattgatttataagcatggaaatcccctgagtgaaacaacgaattgctgtgtgtagtctttgcccatctcccacgatgggcttttttttaacatttttccgcttcgctacctcgcccctcactctttccaataatgttgcacaagatactgtgactctcttcaagccgtcagcaggctgataatgttatttatattttattgtttatttcatgcagccattacacgatgaacgcttatgaactccaggcactccgccatatttttgccatgactattgatgaatgcgcgacctggattgcccagaccggtgacagtgaaagctggcgtcagtgggaaaatggcaagtgtgccattcctgatcgtgtagtcgagcaactgttggctatgcgtcagcaaagaaaaaaacatcttcatgccatcatagagaaaataaataaccgcatcggcaacaacaccatgcgttttttccccgacttaaccgcatttcaacgagtctaccctgatggcaattttattgactggaagatctatcaaagcgtagctgctgaattatatgcacacgatctggagcggctttgttaatttttccacagaaaggaattgtcgttgttacaacaataatgaacggatgctgacacaacatcgcttcactttttaaagcacctttgctaagtagaacctatgaaaaatccctatttccctaccgcacttgggttgtattttaattacctggtgcatggtatgggcgtccttttgatgagcctgaatatggccagcctggagacactttggcagactaatgccgcgggtgtcagcatagttatcagtagcctgggcattggtcgattaagtgtcttgctttttgcaggattattatccgatcgctttggtcgccgcccttttatcatgctcgggatgtgctgctatatggccttcttttttggcatcctgcagaccaataacatcattatcgcttatgtttttggctttctggcgggaatggcaaacagttttctcgatgcaggcacttatcccagtttgatggaagcttttccacgcagtcctgggacagccaatattttaattaaagcatttgtttccagcggacaatttttattaccgctaatcattagcctgttagtgtgggctgaactgtggttcggttggtcctttatgattgctgcaggcattatgtttattaacgctctgtttttataccgttgtacgttcccaccccatccgggtcgtcgcttacctgtcataaagaaaaccaccagctctacggaacatcgctgtagtattatcgatttagccagttataccttatatggctatatcagtatggcaacgttttatctggttagccagtggctggcacagtacggacaatttgttgcaggcatgagttacactatgagcatcaaactactcagtatctacaccgtgggtagcctgctttgtgtatttattaccgctccactcattcgtaataccgttcgcccaacaacattactgatgctgtacacctttatcagttttattgctctgtttaccgtctgcctgcatcccacattttatgtggtgataatatttgcttttgtcattggttttacctctgctggaggtgttgtgcaaattggcctgacgttaatggctgaacgtttcccttacgctaaaggtaaagctacagggatctattacagtgcgggcagtattgcgacctttactattccgttgattacggctcatctgtcccaaagaagtattgccgatattatgtggttcgataccgccatcgctgccatcggttttttactggcactgtttatcggcttacgcagccgcaaaaaaacgcggcatcacagcctaaaggaaaatgtcgctccgggtgggtaatgcaatattcttttcaggtcatgcaagatcttacggataaataactctttctgcgctaactaaggaaaatcgcgatcaaaaacaaactatgacatgcaatattcctggaaacataaactttatgccatgtacccagggaaaatcatcttcagtatagtaattatgtaaaccgtcggagaacaatacgtacggtaacgaaattatctttcagcaaggagctgtgaaaatgtctcaaaataaggctttcagcacgccatttatcctggctgttctttgtatttacttcagctacttcctgcacggcattagtgttattacgcttgcccaaaatatgagttctctggcggaaaagttttccactgacaacgcgggcattgcctacttaatttccggtatcggtttggggcgattgatcagtattttattcttcggtgtgatctccgataagtttggtcgtcgggcggtgatattaatggcagtaataatgtatctgctattcttctttggtattcccgcttgcccgaatttaactctcgcctacggtctggcagtgtgcgtaggtatcgctaacagtgcgctggatacgggtggctaccccgcgctcatggaatgctttccgaaagcctctggtagcgcggtcatactggttaaagcgatggtgagttttgggcaaatgttctacccaatgctggtgagctatatgttgctcaataatatctggtacggctatgggctgattattccgggtattctatttgtactgatcacgctgatgctgttgaaaagcaaattccccagccagttggtgggcgccagcgtaactaatgaattaccgcaaatgaacagcaaaccgttagtctggctggaaggtgttagtagcgtactgttcggtgtagccgcattcagcaccttttatgtgattgtggtgtggatgcccaaatatgcgatggcttttgctggtatgagtgaagctgaggcattaaaaaccatctcttattacagtatgggcagcttggtctgtgtctttatttttgccgcactactgaaaaaaatggtccggcccatctgggctaatgtatttaactctgcactggcaacaataacagcagccattatctacctgtacccttctccactggtgtgcaatgccggagcctttgttatcggtttcagtgcagctggcggcattttacagctcggcgttagcgtcatgagtgagttttttcccaaaagcaaagccaaagtcaccagtatttatatgatgatgggtggactggctaactttgttattccactgattaccggttatctgagcaacatcggcctgcaatatatcattgttctcgattttactttcgcgctgctggccctgattaccgcaattattgtttttatccgctattaccgcgttttcattattcctgaaaatgatgtgcggtttggcgagcgtaaattttgcacccggttaaacacaattaagcatagaggttaaaggagttaattatggatgttaccgcaaaatacgaattgattgggttgatggcctatcctatccgccacagtttaagccccgaaatgcagaataaagccttagaaaaagcgggattgccatttacctatatggccttcgaagtggataacgatagctttcctggagcaattgaaggattaaaagccctcaaaatgcgcggaactggtgtaagcatgccgaacaaacaactggcgtgtgaatatgttgatgaattaacaccagctgccaaactggtgggggccatcaacaccatcgttaatgatgatggctatctgcgtggctataacaccgacggcacgggccatattcgcgccattaaagagagcggttttgatatcaaaggcaaaacgatggtgctgttaggggccggtggtgccagtacggcaattggcgcgcagggggcaattgaaggtttaaaagaaattaaactctttaaccgtcgggatgagttcttcgataaagccctcgccttcgcgcagcgggttaatgaaaacaccgattgtgtcgtcacggtcaccgatctcgccgatcagcaagcctttgctgaagccctggcttccgccgacattttaaccaatggcacaaaagtgggtatgaaaccccttgagaatgaaagtttggttaatgatatcagtctgttacatccgggacttctggtcactgaatgcgtgtataacccgcatatgacgaagttattgcagcaggcgcaacaagctggttgcaaaacgattgatggatacggcatgttgttgtggcaaggggctgaacagttcacattatggactggcaaagatttccctctggaatatgttaaacaggtcatggggttcggtgcctgacaggctgaccgcgtgcagaaagggtaaaaaatgaaaaccgtaactgtaaaagatctcgtcattggtacgggcgcacctaaaatcatcgtcagcctgatggcgaaagatatcgccagcgtgaaatccgaagctctcgcctatcgtgaagcggactttgatattctggaatggcgtgtggaccactatgccgacctctccaatgtggagtctgtcatggcggcagcaaaaattctccgtgagaccatgccagaaaaaccgctgctgtttaccttccgcagtgccaaagaaggcggcgagcaggcgatttccaccgaggcttatattgcactcaatcgtgcagccatcgacagcggcctggttgatatgatcgatctggagttatttaccggtgatgatcaggttaaagaaaccgtcgcctacgcccacgcgcatgatgtgaaagtagtcatgtccaaccatgacttccataaaacgccggaagccgaagaaatcattgcccgtctgcgcaaaatgcaatccttcgacgccgatattcctaagattgcgctgatgccgcaaagtaccagcgatgtgctgacgttgcttgccgcgaccctggagatgcaggagcagtatgccgatcgtccaattatcacgatgagcatggcaaaaactggcgtaatttctcgtctggctggtgaagtatttggcagcgcggcaacttttggtgcggtaaaaaaagcgtctgcgccagggcaaatcagcgtaaatgatttgcgcacggtattaactattttacaccaggcataagcaataatatttcggcgggaacaccctccccgccgaactaaaaaatatattcaatcgtatttaataaaaatatttcgtgagtctctgtgcgctaattctccatttggcgtagggaaaatcacatctgaatcaggaattaacaatgaaacctgtaaaaccacctcgtattaatggacgagtgccggtcctgagcgcacaggaagcggtgaattatattcccgacgaagcaacactttgtgtgttaggcgctggcggcggtattctggaagccaccacgttaattactgctcttgctgataaatataaacagactcaaacaccacgtaatttaagcattattagtccaacagggcttggcgatcgcgccgaccgtggtattagtcctctggcgcaagaaggtctggtgaaatgggcattatgtggtcactggggacaaagcccgcgtatttctgaactcgcagaacaaaataaaattattgcttataactacccacaaggtgtacttacacaaaccttacgcgccgccgcagcccaccagcctggtattattagtgatattggcatcgggacatttgtcgatccacgccagcaaggcggcaaactgaatgaagtcactaaagaagacctgattaaactggtcgagtttgataacaaagaatatctctattacaaagcgattgcgccagatattgccttcattcgcgctaccacctgcgacagtgaaggctacgccacttttgaagatgaggtgatgtatctcgacgcattggttattgcccaggcggtgcacaataacggcggtattgtgatgatgcaggtgcagaaaatggttaagaaagccacgctgcatcctaaatctgtccgtattccgggttatctggtggatattgtggtggtcgatccggatcaaacccaactgtatggcggtgcaccggttaaccgctttatttctggtgacttcacccttgatgacagtaccaaacttagcctgcccctaaaccaacgtaaattagttgcgcggcgcgcattattcgaaatgcgtaaaggcgcggtggggaatgtcggcgtcggtattgctgacggcattggcctggtcgcccgagaagaaggttgtgctgatgactttattctgacggtagaaacaggtccgattggcggaattactagtcaggggatcgcctttggcgcgaacgtgaatacccgtgccattctggatatgacgtcccagtttgatttttatcacggtggcggtctggatgtttgttatttgagttttgctgaagtcgaccagcacggtaacgtcggcgtgcataaattcaatggtaaaatcatgggcaccggtggatttattgatatcagtgccactagcaagaaaatcattttctgcggcacattaactgcgggcagtttaaaaacagaaattaccgacggcaaattaaatatcgtccaggaaggacgggtgaagaaatttattcgggaactaccggaaattactttcagcggaaaaatcgctctcgagcgagggctggatgttcgttatatcactgagcgcgcagtattcacgctgaaagaagacggcctgcatttaatcgaaatcgcccctggcgtcgatttacaaaaagatattctcgacaaaatggatttcaccccagtgattagcccagaactcaaactgatggacgaaagattatttatcgatgcggcgatgggttttgtcctgcctgaagcggctcattaacaggagtataatgatggatttttctttaactgaagaacaagaactgctgctggccagtattcgcgaactgattacgactaactttccggaagagtatttccgcacctgcgatcaaaacgggacatatccgcgtgagtttatgcgggcgctggcggataacggtatttccatgcttggcgtgccggaagaatttggtggtatccctgcggattacgtcacccaaatgctggcgctgatggaagtgagtaaatgcggtgctccggcatttttaattaccaacggtcaatgtattcacagtatgcgccgtttcggttctgcagagcagctacgtaaaacggcagagagcaccctggaaacgggtgatcccgcctatgccctggcgttgacggaaccaggtgctggcagtgataacaacagtgccactaccacttacacgcgtaaaaacggcaaggtctacatcaacggacaaaaaacctttattaccggtgcgaaagagtacccgtatatgctggtgctggcgcgcgatccgcaaccgaaagatcccaaaaaagccttcaccctgtggtgggtcgactccagtaagcccggcattaagattaacccgctgcataaaatcggctggcatatgctcagcacctgcgaagtctatctcgacaacgtggaggttgaagagagcgacatggtgggcgaagaaggaatgggtttcctcaatgtgatgtacaactttgagatggagcgcctgatcaacgccgcgcgcagcaccggctttgccgaatgcgcctttgaagatgccgcccgctatgccaaccaacgtatcgcttttggtaagcccattggtcataaccagatgatccaggaaaaactggcgctgatggcgattaagatcgacaacatgcgcaacatggtgctgaaagtggcatggcaagccgatcagcatcagagtctgcgcaccagcgcggcgctggcaaaactgtactgtgcacgtaccgcaatggaagtcattgatgatgcgattcaaatcatgggcggtctgggctataccgatgaggcgcgcgtctcccgcttctggcgtgatgtccgttgtgaacgtatcggcggcggtacagacgaaattatgatttacgtagcaggtcggcagatcctgaaagactatcagaacaaataatctgcaggcggcgcagcttcttaacaaactgcgccgccagatttatccaacaagacttaccggttgaggaaattcagataggatttcttgttccgcaaaacagtttttaaattgtctacggtaatcgctggggctacaaccgacatggcgcaaaaacagtttggcaaagtgatcgacattttcataacccacacgccaggagatctctgcctgacttaattcagtattagtgagactccattttgcttccgtcatacgccgttgaataacatagttaataggggaaatacgatactctttggtaaattcatggcaaatataactgacgctggcacgaaattttttgcttaactgttctaaagtgattttttcgcgataattattattcagatagaaaagaatatcttttatcagaacatcttttttaatatacccctgctcgctacgataagcatttttaaaattttcgtagtaaagaatggctaacgtataggcaaatgcatcccataagctagatgtttggctatttttactttgcggcaaaatcacacttagctcattaaataaggtttttatgacttcttttccctgccccgcggcaattaccggacaagaatgcggttgcagtagctgattttcctcagccccctgaaactgaaagccgtacagcgcacaggtacacgtcgttgccggatcgttaacgtcagaggccaccgcatgcagcctgccgcgttctatcaccacaatgtcatccgcatgtgcgacatataagctagaatcgatggtaaaccttgcaacccctttcttgacgtaaatcaactcggtttcattgtcatgaacgtgatgtccggactcccattttggatcatcgctaaatgcaaaacgactaagccgtggcgttttaccggcgacaaacagcgtttcactggcgttatcaaaacagcgttgatacatgacaacctccctattccatgagcaagcaaaaacaatatatgccggataaaatacggcgtgtattgcggttatacaaccgcgtttagcgagagctaaacaagattatttacactgaatgcaagattgtacggtcatggaataactatattgccgcaaattgcacttttgttttagcgatcgcattttttttgcaagattgttggcaaggaaaacagcttgctccgtcgaaaaccccgcaccgctatcgcacactattttcaggccatttttaccttccatcggagatggttccgtatgcgactcacaggagaaatcatgaaaataataacctgctttaagctggtgcctgaagaacaggacattgttgtcactccagaatacaccctgaatttcgacaatgccgacgccaaaatcagccagttcgatctcaatgccattgaagctgcaagccagctcgcaacagatgacgatgagatagccgcgctgaccgttggcggcagtttgttgcagaacagcaaagtgcgcaaagacgtgctatcccgcgggccgcacagcctgtatttggtgcaggatgcgcaacttgaacatgcactgcctctcgataccgcaaaagcgctggcggcagcaattgaaaagatcggcttcgatttactgatctttggtgaaggttccggcgacctttatgcccagcaggttggcttgctggtcggagaaattctgcaacttccggtgattaatgcagtgagtgctattcagcgtcagggcaatacactggtgattgaacgcacgcttgaagatgatgttgaagttattgaactctctgttccagccgtgctctgcgtcacctccgatattaacgtgccacgcattcctagcatgaaagccattctcggcgcgggtaaaaaaccggtaaatcagtggcaggcaagtgatattgactggagccagagcgcgccacttgctgaactggtcggcattcgcgtaccgccgcaaacagaacgtaagcacatcattatcgataacgatagcccggaggccattgccgagctggcggaacatctgaagaaagccctgaactgaagcctacggagaagaaacgatgagtcaattaaacagcgtctgggtctttagcgataatcctgaacgttatgctgaactgtttggcggcgctcagcaatggggccaacaggtgtatgccattgtacaaaataccgaccaggcgcaggcagttatgccttatggtccaaaatgtctttatgttcttgcgcaaaacgacgcgctgcaacgcactgaaaattacgccgaaagcattgctgccctgctgaaagataaacaccccgctatgttgctgttggccgcgacgaaacgtggtaaagcgctggcagcacggttaagtgtgcaactgaatgcggcgctggtgaacgatgccacggcggtggatattgtcgatggtcacatttgcgccgaacaccggatgtatggcgggttagcgttcgctcaggaaaagatcaacagcccgctggcgatcattacccttgcacccggtgttcaggaaccgtgcaccagtgatacctctcatcagtgcccgacagaaacggtaccttatgttgctccgcgtcatgaaattctctgtcgcgaacgccgtgcgaaagccgcaagcagcgtggacctgagcaaagcaaaacgtgtggttggcgtcggtcgtggactggcggcgcaggatgacctaaaaatggtccacgaactggcggcggtgctgaatgctgaagtcggctgtagtcgtccaattgccgaaggcgagaactggatggagcgtgaacgttatatcggtgtctccggcgtgttgctgaaatccgatctctacctgacgctggggatctccgggcagatccagcatatggttggcggcaacggcgcaaaagtgattgtcgccatcaataaagataaaaatgcgccaatcttcaactatgccgactacggtctggtgggcgatatctacaaagtcgtccctgccctgattagccagttgagccgctaattcccctttcaaccacatctcccgctgtaaacgcagcgggaagggagcataacgcatgagcgatgacaaatttgatgccattgtggtcggtgcgggcgttgctggtagcgttgccgcactggtcatggcacgagccgggctggatgtcctggtgatagaacgcggcgacagtgccggatgtaaaaacatgaccggcgggcgtctttatgcccacacacttgaagcaatcattccaggctttgcagtaagtgcgccggtagaacgcaaggtcacacgcgagaaaatctccttcttaaccgaagaaagcgccgttaccctcgattttcaccgcgagcagccagatgttccgcaacacgcatcttataccgtattgcgtaatcgtctggacccgtggttgatggaacaagccgagcaggcgggcgcgcagtttatcccaggcgttcgcgtcgacgcgctggttcgtgaaggaaacaaggtcactggcgtgcaggctggggatgatattctcgaagcgaatgtggtgattctggctgatggcgttaacagcatgcttggccgcagcctgggaatggttcccgcttccgatccgcatcattacgctgttggtgttaaagaggttattggcctcacaccagaacagatcaacgatcgctttaatattacgggcgaggaaggtgccgcctggctgtttgccggttccccttctgacggcctgatgggcgggggatttctctataccaacaaggattccatatccttggggctggtttgtggattgggtgatatcgcccatgcgcaaaaaagcgtgccgcaaatgctggaagattttaaacaacaccccgccattcgcccgctgattagcggcggcaaactgcttgaatattccgcgcatatggtgccggaaggcggtctggcaatggtgccgcaactggttaacgagggcgtgatgatcgttggtgacgccgcaggcttctgcctgaatttgggttttacggtccgcggcatggatttagccattgcaagcgctcaggctgccgccacaacggtgatcgccgccaaagaacgcgcggatttctccgccagcagtctggcgcaatacaaacgtgagctggaacaaagctgcgtcatgcgtgatatgcagcattttcgcaagatcccggcgctgatggaaaacccgcgcctgtttagccaatacccacgaatggtagccgacatcatgaacgagatgttcaccatcgacggcaaaccaaaccagccggtacgaaaaatgatcatgggacatgcgaagaaaattgggctgatcaacttgctgaaagatggcattaagggagcaaccgcgctatgagccagaacgctacggttaacgtcgacatcaaattaggcgtcaataaattccatgttgatgagggccacccgcatatcattctggcggaaaatcccgatatcaatgaattccataaattaatgaaagcctgccctgccggactttataagcaggatgacgcaggaaacattcattttgattccgccggttgtctggagtgcggcacctgtcgggtgctgtgcggtaacactattctcgaacagtggcaatatcccgcaggcaccttcggtattgattttcgctacggctaatcatgcatcccacaggcccgcatctcgggcctgatgttctgtttcgagagtccaacatgaaagtgacattaacgtttaacgaacaacgtcgtgcggcgtatcgtcagcaagggttatggggcgatgctagcctggccgattactggcagcagaccgctcgtgcgatgccagacaaaattgccgtggtcgataatcatggtgcaagctacacctatagcgcgctcgatcacgccgcgagctgtctggcaaactggatgttagcgaagggtattgaaagtggcgatcgcatcgcatttcaactgcctggctggtgtgaatttaccgttatctatcttgcctgcctgaaaatcggtgcagtttccgtgccgctgttgccttcctggcgggaagcagaactggtgtgggtgctcaataagtgtcaggcaaaaatgttctttgcaccgacgttgtttaaacaaacgcgtccggtagatttaatcctgccgctgcaaaatcagcttccacaactacaacaaattgtcggcgtggacaaactggctcccgccacctcttccctcagtttaagtcagattatcgccgacaataccagtctgaccacggcgataacgacccacggcgatgaattagctgcggtgctgtttacctccggaaccgagggtctgccaaagggcgtgatgctaacgcataacaatattctcgccagtgagcgggcttattgcgcgcgactgaatctgacctggcaggatgtctttatgatgcctgcgccacttggtcacgcaacgggctttctgcatggcgtaacggcaccattcttaattggcgctcgcagcgtgttgttagatattttcactcctgatgcgtgtctcgcgctgcttgagcagcagcgttgcacctgtatgctcggcgcaacgccgtttgtctatgatcttttgaatgtactagagaaacaacccgcggaccttagtgcgctgcgtttctttctttgcggcggaaccacaatccccaaaaaagtggcgcgtgaatgccagcagcgcggcattaaattattaagtgtttatggttccacagaaagtagcccgcatgcggtggtgaatctcgatgatcctttgagccgctttatgcacaccgatggttacgctgccgcaggtgtagagattaaagtggtcgatgacgcacgcaagaccttaccgccaggttgcgaaggtgaagaagccagccgtggccccaatgtgtttatggggtattttgatgaacctgaattaaccgcccgtgccctggatgaagaaggctggtattacagcggcgatctctgccgtatggatgaggctggctatataaaaattaccggacgcaaaaaagatattattgtccgcggcggcgaaaatattagcagccgtgaagtggaagatattttattgcagcatcctaaaattcacgatgcctgtgtggttgcaatgtccgatgaacgtttaggtgaacgaagttgcgcttatgtcgtgctgaaagcgccgcatcatagtttaagcctggaagaggtagtggctttttttagccgtaaacgggtcgcaaaatataaatatcctgaacatatcgtggtaatcgaaaaactaccgcgaactaccagtggtaaaatacaaaagtttttgttaagaaaagatattatgcggcgtttaacgcaggatgtctgtgaagagattgaataagtttcatcttcggggatcacataaccccggcgactaaacgccgccggggatttattttatttcttcagttcagccaggcttaaccaggtttgcaccacggtgtccgggttcagagacaggctatcgatcccctcttccatcaaccatgcggcaaagtcttcgtggtcggacggaccctgaccgcaaatcccgacatatttgccctgtttcttcgcggcacggatagccatgctcagcagtgctttcaccgcatcgttgcgctcatcgaacaattcagacaccacgccggagtcacggtccagaccgagcgccagctgcgtcatatcgttactgccaatactgaagccgtcgaaatattcgaggaactgctcggccagcaaggcgttggacgggatttcacacatcatgatgattttcagcccgttctcgccacgtttcagcccctgacgcgccagttcttcaaccaccgctttcgcctgatctacggtacgcacgaacgggatcatgatctcaacgttggtcagtcccatgtcgttgcgcacacgtttcactgcttcacactccagcgcgaaacagtcgcggaagctgtcggaaacatagcggcccgcgccacggaagccgagcatcgggttctcttcatctggctcgtaacgctcaccaccgaccaggttggcatattcgttgcttttaaaatcagagagacggacaatgacgcgcttcggataaaacgcggcacccagcgtcgcgatcccttcagtcagacgaccaacgtaaaattcacgcggagaatcaaaacctttcatcatctcgcggatttcgttttgcaactgcggttcctgatcgtcaaactcaagcagtgcgcgtgggtggacgccaatcatacggttgatgataaattccagacgcgcaaggcccacgccttcgttcggtaggcaggcgaagtcgaaagcacggtccgggttaccgacgttcatcatcactttcaacggcagatccggcatcgtttctacgctggagcttttcacgctaaattccagcaactccgcatagacgtaaccggtatcaccttcggcacaagaaacagtgacgttctcaccgtctttcatccgttctgttgcatctccacagcccactaccgccggaatgcccagttcacgagcgatgatcgccgcgtgacaggtacgaccgccacggttggtgacgatggcagatgctttcttcatgatcggttcccagtccgggtcggtcatgtcagtaaccagcacgtcgccaggttcgatgcggttcatttcgctgatgtcatggatgactttcaccggacccgcaccgatgcgatgaccgatagcacggccttcggcgataatcttaccctgactatgcagcgtataacgctccatgacctgaccgcgactgcgcacggtttccggacgcgcctgcacaatgaacagtttaccggtgtggccatctttcgcccactcaatatccatcgggcgaccgtagtgtttctcaatttgtacggcctgttttgccagttcctgcacttcttcgttggtcaggctgaagatgtcacgctgttcctgcggtacgtcttcgattttaacctgcttgccgtgctcctgggtcggcgcgtaaaccatgcggatttttttgctccccatggtgcggcgcacgatagccgggcgattcgccgccagtgtcggtttatgcacgtaaaactcatccgggttaaccgcaccctgcacgaccatctcaccaaggccccatgcggaagtgataaacaccacctggtcaaagccggattcggtatcaatggagaacatcacgccagaacttgcgaggtcagagcgcaccatccgttgaacaccggcggagagcgccacaccacggtgatcgtaaccctggtgcacacgataagagatggcgcgatcgttaaacagagaagcaaatacatgtttcactgccacgagaacggcgtcaaaaccctgaacgttgaggaaggtttcctgctgaccggcaaaagaagcgtccggcatatcttctgcggtggcggaggagcgcaccgcaaaagaggcgttttcgtcatcggcggaaagctgtgcataggcttcgcggatggcgttttccagctcaggctggaagggagtgtcgataatccactggcggatttgcgcgcccgctttcgcaagctgagtaacatcgtcaatatccgttttatccagcagttcataaatgcgctggtttacgccgctttggtccagaaactggttaaacgcgtcggcggttgtggcgaaaccattcggaacggaaacacccattccggaaagattagtaatcatttcacccagggaggcatttttgcccccaaccctgtctacatcattcatgccgagttggttataccaaagcaccagcggactgctgccattgttggacatcgaacaatccttttgtgataaatgaacggtttgagaaacacatttctgcgcatttatctttgcatatttaaccggatgaaaaaaacggtgaatcgttcaagcaaatatatttttttactttttaagactgatcccagcgttgcgcaaatctgctctcttcgacaatttccacataaaccatcggtataaacgaaaccataaaaatgaaatgctgttttcataaaaaataaaattgaaggttcattttataaaccagacataacgttctacgcttctgtgcgtttttaatttatgctttcatagaattatgtctgcatcacgggaagaacaaaatggataatgctgttgatcgccacgttttttatatttctgatggtacggcaataactgcggaggtattaggacacgcagtaatgagtcaatttcccgtcactatcagcagcatcacgctgccgtttgtcgaaaatgagagccgtgcacgggcagtgaaggatcagattgacgcaatttatcaccagacaggcgtgcgcccgctggtcttctactccatcgtgttgccggagattcgcgccatcatcttgcaaagtgaaggcttttgccaggatatcgttcaggcgctggttgccccgctacaacaagagatgaaactggatccaacgccgattgctcatcgtacccatggccttaaccctaataatctcaataaatatgatgcgcgcattgcggcgattgattacaccctcgcccacgatgacggcattagcttgcgcaatctggaccaggctcaggtgatcctgctcggtgtttctcgctgtggtaaaacccccaccagtctgtatctggcaatgcagtttggtatccgcgcggcaaactacccctttattgccgacgatatggataatctggtgctacccgcgagcctcaaaccgcttcagcataaattgttcggcctgactatcgacccggaacgtctggcggcgattcgcgaggaacgtcgggagaacagtcgctatgccagccttcgtcagtgcaggatggaagtcgcggaagtggaagccttgtaccgtaaaaatcagatcccgtggattaacagtaccaattatagcgtagaagagattgccaccaagatcctcgatatcatgggccttagtcgccgaatgtactaaagaactagtgcattagcttatttttttgttatcatgctaaccacccggcgaggtgtgacacacctcgcacttgaaatcagcagcgattggtttatcgtgatgcgcatcacttcccggcagtcctgccgtagaagcaacaaatttctgagacttgtaatgaacagaactgacgaactccgtactgcgcgtattgagagcctggtaacgcccgccgaactcgcgctacggtatcccgtaacgcctggcgtcgccacccatgtcaccgactcccgccgcagaattgaaaaaatactgaatggtgaagataagcgactgttggtcattattggcccctgcagcatccacgatctcaccgctgcaatggagtacgccacccgtctgcagagcctgcgcaaccagtaccagagtcggctggaaatcgtaatgcgcacctattttgaaaaaccacgaactgttgtcggctggaaaggactaatctccgatccagatttaaacggcagctatcgggtaaatcacggtctggagctggcgcgcaaattacttttacaggtaaatgagctgggcgtcccaaccgcgaccgagttcctcgatatggtgaccggtcagtttattgctgatttaatcagttggggcgcgattggcgcacgtactaccgaaagtcagatccaccgcgaaatggctagcgcactctcctgtccggtaggttttaaaaatggtaccgatggcaatacgcggattgctgtggatgctatccgcgcagcccgcgccagccatatgttcctcagcccagacaaaaatggtcagatgaccatctatcagaccagcggcaacccgtatggccacattattatgcgtggcggcaaaaaaccgaattatcatgccgatgatatcgccgcagcctgcgatacgctgcacgagtttgatttacctgaacatctggtggtggatttcagccacggtaactgccagaagcagcaccgtcgccagttagaagtttgtgaggatatttgtcagcaaatccgcaatggctctacggcgattgctggaattatggcggaaagtttcctgcgcgaaggaacgcaaaaaatcgtcggcagtcagccgctcacttacggtcaatccattaccgacccgtgtctgggctgggaggataccgaacgcctggtcgaaaaactcgcctctgcggtagatacccgcttctgaatgcgtgcccattcctgacggaatgggcatttctgcgcaacttgttgtcttctcaacaaattactgcttgctctggtcagccataatattgataataagaatcattgttatatcaattattattaatttttatgcgttatacggatagcagaaaactcacgcctgaaacggatgccaatcacaagaccgcttccccgcagcctattcggcgaatttccagccagacactgttaggtccggatggcaaactgattatcgatcatgacgggcaagaatatctgctccgtaaaactcaggctggcaagctgctgttgaccaagtaacctttaactgctgcagctgacttccagccgtttaccccagtcaggtggacgactgacatagtcatcatctctgtcgctgaaaggatttcgcaacgcctcatgcaggcggtgcaattccgtcatatcacccttttctgccgcttcaatcgcccgttgcgccaaccagttgcgcaataccagagcggggttaacgctttgcatcagttgctgacgctcactatcgctaacctcgtcttgttgcaaacgcccccgataacgggcaaaccagtcatcaaatgccgcacgatcaataaactcatcacgtagcggactcgccgcgctgtgctgctcggtcagactcagcatgcggaatgtgcgggtataatcgctgcgctctcgcgccatcagactgaataattcattcagtagcgcgttatcctctttttgctccgtcatgaagcccagtttctgccgcatccgttctccataatgcgtcaacaaaacctgctgatagctgtccagggcctcattcagggcatctacggcaacaaatgggctcaatgtctgcgccagacgctgtaaattccacaacgcgacggcaggttgattatcaaagctgtaacgcccttgatgatcgctgtgattacaaataaaaccgggttcgtaatcatcaagaaaaccaaacggcccgtaatcaagcgtcagccccagcaggctcatgttgtcggtattcatcaccccatgagcaaagccgaccgtctgccattgggcaattaagctcgcggtacgtgcgacaacatcgctaaaccagagacggtatttgtcctcatcatctgcaagatgactccagtaatgacgaatagcaaagtcagctaactgacgaaccttttcgctctcgcggcggtagtaaaaatgttcgaaatgaccaaagcgcagatgacttggtgccacacgcatcagcatcgcgcctggctccgccgtttcccgatacactgggctatcgctggtgacgatacttaacgcgcgggtcgtcggaatgcccagataatgcatcgcctcactggcgagactttctcgtatcgtgctacgtaaaaccgcccgtccatcacccattcggctataaggcgtcaggccagcacctttcagatgccagtccattgtagtgccatcagcaagcagttgttcgccgagtaaaatgccgcgcccatcacccagttggcccgcccagacgccgaactgatgaccactgtaaacctgcgccagtggactcataccaggcagtagggcttcgccgccccagacacctgcgccatttttaaacaggctgcttggaatactcagcgtgttagccagttcggtattatgccaaatcagccgggcattatttaaaggcgtaggggaaagtgctgtataggtttctggcaattcatcgcgccagcgggtaacaaaagacagggtcatagatcctcctgtttgatagtgtagacggttactctcgtcttaaacaccagcaaacagaagggttatcgctgaaccaacgtcgttatctgatttatgggaacggcaggccacaggcatccctggagagcatggaaatcgaagggggtaatctgtgccaatatttctgccgtatcaatgcctcccgcaatgatgcaattgcaacaaggggaaatttgcgcctggatcgcacgaataaacggttcgaaggagcggtgcgtgatttgttgctgaataaaacttttatccagcatgacgcgggtgaaaagaccatcaaaaaccgctttcattgtgctattgcctgctcccaaattacctaacacaaggggatacacttggcttaaggataaaagaccgcgattatcttttccttcattgagatgcgggtaattctcattaatcaacagttcaataaacggatattttaatagttcgcctgcgtaattatccctctctaataataatgtagccacttgtggcgttaaattaagccaggcaaagagtttatgttgaataaaaaaatgttggcaactttttagtaattccaactgctcactaaataattgccaatgttgctcctcggtaagttgcgctataacccgactcgtcgggatacgaaccgtaccatcttcactggagaaatgggtaattaactcaacgccgacaaggacttgctggttgtctcttatcggcaggaaatagcaatcagaatgataaagattctccaaaaaaatcttcatggtaaccgtccctctcgaaggatgtttttcagtatccggctaaaagggatgaggccataagacataacaattacagaaggagtaactttcatttgttccatgttaaccactttttcaggggtcctttttttagattatcctgattataaacgaataatccatttacggaatttttgtctgcaaaatactactgtattcaggagtaaatggacggcgatgtatcatcgccgtccatttttcgacatattagattcgtctcgcctgccagaaatttttctgccaatagacattatcaagactggaacgcatcactcccttgctggtagaggcgtggataaattggttgttggtatcgtaaatacctacatgcaaaccattttgtccggaccccgttttgaaaaagaccaggtcacctggcagcaactcgtctttatcaatttgcgtgccaatagaggcttgttgtttggtttcacggggcagctgcaaatcgaaacgatcgcgcatcgtcacaaccacaaatccgctacagtccacaccgcgccgcgtcatgccaccataacgatacggcgtgccatgccagctttgtagctggtcgttcaaaccggcaataacggtaatgctatcagaaagtctggcatttggcggcggtgctttatggtggctacacccggccagaagcagtgctgtgatcaaaataaggcagaaacgcattccgtacggttcctctgttttttattcttgcattaatttagcgtcgtaattacccgattttcaagatactaatgaaatcagatggtgctaatcagcattctgtgaccttcgatatccagacggcgaaaattcatcccataggcctgcgccagatttggcggcgtgagcacctcttccctgcgtccactggccagcatttttccaccttttagcaaccacgcccgatgcgcatgacgcaatgtgtggttgagatcgtgactgctcatcacaatcgccagtccttgctgacacagcgcgctcagaattttgtctaacgcactttgttgcgcaacatcaagactgttcatcggctcatcaagaagcagcaattggcctgcgggattggcttgtggtgtgatttgcaacaccaccgcagcaagacgtacgcgttgccattcaccgccggaaagttgattggtgctacgtccgagtttgtcatcaagagccagcgcccctgcgacatcattcagtagttcggtacgcgttttatcgtgctgatgcagtgtcaggtagtgccagaccggcgttgcaaacggcggcgtctgctgttgactaagataggcgcgatgcagcgcgagttttgttgcggaccatgcttccagtggttgccccgcgaactgaatgcttcccttaccgctggtcattccggccattcgcgccagtaaggtactcttacccgcgccattcggccccaccaggtgcaggatctccccagcccgaacctcgccagaaagcggccccaggcgggtagattccgcaacatcttgtaactgcatcacaatagacattattttgccaacgccagtttaatgctttccatcacaatgggatcttccggcgtcatatccggggaaaaacgctggatgacttttccgtccctgccaaccaggaatttttcaaaattccataaaatatcatccgggtacagcggtgcacggcctttgctgaccatacgggcatagaatccgctctcttccggcgcgactgcggtcggcgctgcggcaatcaatttttgatacagcggatggcgtccttcgccattaacttcaatcttactgaacatcgggaacgtcaccccccatgtggtggtacagtaagttttaatctcttcatcgctgcccggttcttgttccagaaactggttgcacgggaatcccagcaccataaaacctcgatcgacccaggctttctgaatattctccaactgctcatattgcggcgttaagccacacttactggcgacattgacaatcaacagcacattaccggcgaacttctccagcgtggtcacttcaccgtcgatatctttcactacggtcgtcagaatggaatcttgcatcgtttctcctgggtgtggtcagtaaaaatcttagcttttaatcatagaccgtctttttgcggttaacgtcctgcttttaacaataaccagataaacaccggcgcacctaacgttgcggtgaccacgccaataggcagctctgcggcagctaatgccaggcgcgctacaatatcggccagcagcaatgcgctcgcccctgccagcgcgcagccgggaagtaatacgcgatgatcggttaaaccacacaaccggagaatatgggggatcaccagaccaataaagccgatagcacccgccagcgccacactgacgccaaccatccagccggtcgctgccaccagcacattgcgccagaaccacaggggtaaacccagttgccgcgcgctgatctcgccaagtgctaacatattcatcggcctggactgacaacagatccacaacaacacggggatcaatgccagcatcagccagctttgccgccagtctacgccgccaaaaccgcccatcatccagtacatcagctgacgcaaatcaacactggtggaaaagtagatagcccacgtcattagtgcgctacagataatccctaatgcaacgccagccagcaataaccgactggtgctaagatgacgacgggcgaaacgtaagagtattaaagtgatgataagcgcgccagcaatcgcacacagccctagcgcccagttggggagttgcccttgcccaagcaataccgcggcgataagccccacgcctgcgccgttagagacgccaagtagtccaggttctgccagaggattttcaaacaacgcctgcattacagcgccggatatagccagcgccgcaccaaccagcaatacagccagcgtacgtggcaggcgaatttgccagacgaacagttcgccacgaggagtaaaccagtcacctgggctgatccattgttcaccggcgcaaaggcttaagagaagcgccagcagcatcaaaacactcaggcataataaccagcgaatattttgtcgctgttgttggcgggcaagtgtcagcatggtatccgttctgctgaagtgtcatggcgttgattttacggtgactcttcgacagtgaaaagaaaaaaggccgcagagcggcctttttagttagatcagattactcgtctttggggctagcgttttcgacccggctttttaacttctgcccgggtctgaaggtcaccacgcgccgtgctgtaatgggaatatcctcgcccgttttcgggttacgtcccgggcgttgattcttatcacgcagatcgaagttaccaaaaccagagagtttcacctgttcgccgttttccagagcgcgacggatctcttcgaaaaacagttcaaccagttctttggcatcccgcttgctaagcccaagcttatcaaacagatattcactcatttcagcttttgtaagcgccataggttcaatccctcaaacttgcctggaatcgctcttttaatgcctctacacatttggcgacggtagcggcaatctcctcttcttcgagtgtacggctggtatcttgcaggatcaggcttatggcgaggctcttatacccctccgcaacacccttaccgcggtacacgtcaaataagtttacgccaactacctgatttacgccaactttcttacattcggataaaatatccgctgcgggaacgttttctgcgaccaccaccgcgatgtcacgacggttcgccgggaagcgagaaatctcgcgcgcctgaggcaccacgcggtctgcgagcttgttccactccagttcgaacaccagagtgcgaccgttaagatccagtttacgttccagttcaggatgaacaaccccaacaaaaccaatacgttcacctttcagataaatcgctgcggattgccccggatgcagtgccggattcgcttctgcacggaactcaacctcattcagtttaccggtcaggtcgagaacggattcaagatcgcctttcaaatcatagaaatcaacggtctcttttgccaggttccagtgctcttcgtaacggttaccgcaaatcacaccggctaacatcagatcctgacgaatgcccaacggtgcctgagtatctggtacgaaacgcagaccgctttcgaaaatgcgcacacggttctgctgacggttctggttgtacaccacggttgccagcaggccagtccacagagaaagacgcattgcactcatttcaacagagatcgggcttggcagcagtaaggcttcaacgcctggatggatcatctgctgcactttcggatcaacgaagctgtaggtgatcacttcctgatagcctttgtcgttgagcagcgttttcacgcgcttgaggctcaggtcagcttcacggtgagtacccataatcaggcttgcctgtaccggctcatccgggatgttgttgtagccgtaaacacgcgcgacttcttcaaccagatcttcttcaatctccatatcgaaacgccagctcggcgcaactgcctgccattcgtctttgccttcggtcacttcgcagccgagacgacgcagaatgtcagttacctgctcatccgcaatatgatggccgatcaggcgatccagtttgctacgacgtagagtgatggttgcacgcttcggcagcgttgcttcgttggtgatatcaattaccgggccagcctcaccaccgcagatgtcgatcagcagacgggtcgcacgttccatcgctttgtgctgcagtgccggatcaacgccacgctcataacggtgagacgcatcggtatgcaggccatgacgacgagcacgaccggtgatagacagcgggctaaagaacgcgcattccagcagcacgttttgtgtttcgtcattcacgccagagtgttcgccaccgaagatgccgcccatcgccagcgccttgttgtggtcggcgatgaccagagtgtcagcattcagcttcgcttcagtaccgtcgagcagcaccagcgtttcgccctctttcgccatccgcaccacaatgccgccttcaatgcgatctttatcgaaagcgtgcatcggctggcccagttcgagcagcacatagttggtgacgtcaacaactgcatcgatagaacggatcccgcaacgacgcagtttttctttcatccacagcggagttggcgctttaacgttaatgccttttaccacacggccaagataacgcgggcaggcttccggcgcttcgactgtaatcggcagcgtgtcgtcgatggtcgcaccaaccggaacgatttccggttgaaccagcggcagctggttcagcacggcaacgtcacgcgcaacaccaatgatgcctaagcagtcggcacggtttggcgtcacgctgatttcgatggtgttgtcatcaagtttcaggtattcacggatatcggtgccaatcggcgcatccgcaggcagttcgataatgccgctgtgatcgtcagaaatgcccagttcagagaaggagcacagcatcccttcagacggttcgccacgcagtttcgccgctttaattttgaaatcacccggcagaacagcaccaatggtcgctaccgctacacgcaggccctgacggcagtttggcgcaccgcagacgatgtccagcaggcgatcgccgccgacattcacttttgtcacacgcagtttgtcagcgttcggatgctgcgcacactcaaccacttcaccaacgaccacgccgtggaagctgccggcaaccggttctacaccgtcaacttccaggcccgccatagtgatttgatttgccagcgcatcgctatcaatcgccgggttcacccattcgcgtaaccacagttcactgaatttcataatctattcctgccttatttaaactgtttgaggaaacgcagatcgttttcgaagaaactacgcaggtcggtgacgccgtaacgcaacatagtcagacgctccatccccatcccgaaggcgaaaccagagtaaacttccgggtcgatgccaacgttacgcaacacgttcggatgcaccatcccgcagcccagcacttccagccatttaccgtttttacccatgacgtccacttctgcagaaggttcggtaaacgggaagtaggaaggacggaagcgaatctgcaaatcttcctcaaagaagttacgcaggaagtcgtgcagcgtgcctttcaggttggtaaagctgatgttggtatcaacaatcagaccttccatctgatggaacatcggcgtgtgagtctggtcgtagtcgttacgataaacacggccaggcgcgatgatacgaatcggtggctgctgggctttcatggtgcggatctgtacgccagaggtctgggtacgcagcaggcgggtagtgtcaaaccagaaagtgtcgtggtcagcgcgcgccgggtggtgaccaggaatgttcagagcatcgaagttatgataatcgtcttcgatttccggcccggttgccacggtaaagccaagctcaccgaagaaactttcgatacggtcgatggtacgggtaaccggatgcagaccgccgttttcaatgcgacgacctggcagagagacatcaatcgtttccgccgccagacgcgcattcagtgcagcgctttccagttccgctttacgcgcattcagcgcctgctgaacctgctctttcgcttcgttgataaccgcaccagctgccggacgctcttctggcggcagctcacgcagggtcgtcatctgaagggttaagtgcccttttttacccaaatattcgacgcgcacattatctaacgcggcaacatcactcgcctggctaatggccgccttcgcactggcaaccagttctgcgagatgactcatggttttcctcattgtgtcagtggtgacactggttcgttggacttagagcctatcccatcaggctattttacttgccattttggtcccgggctgtgctcgaaattctcacgtacttaaatacgctccggtttctccgcgctggccgtgtccagtctggctgcgacaattacacctgatgagacaggctttttatttttcaaaacgcgcatacaaaaaaagcctccactgggaggctttcaggcgctgttttccgtttctcttctcacgcgctagcctcctggattcaggtgctaaagtaaaaaaagaagcggaaaatagcagcattcattgcttgcgttaccttttggtactcttcaaaagacctttattgaaaaggctacggcgataaaagtcaatgttttgatggcgttgaaacgaaaagagggagactagctccctctttcaactggcttatgccagagctgctttcgctttttcaaccagagcggtgaacgctactttgtcgaatactgcgatatcagccaggatcttacggtcgatttcaacagaggcttttttcaggccattgatgaatttgctgtaagaaataccgttctgacgtgctgctgcgttgatacgcgcaatccacagttgacggaactgacgcttacgttgacgacggtcacggtaagcatactgaccagctttgataacagcctggaaggcaacgcggtatacgcgagaacgcgcaccgtagtagcctttagcttgtttcaaaattttcttgtgacgtgcacgtgcaataacaccacgttttacgcgagccatatgtgctctcctgtatctatattctaattaaaaagttaaaaacgttaacggcttatgcgtacggcaggcacgcgattaccaggcccagatcgcctttggaaaccatggctttcggacgcaggtgacgtttacgtttggtcgcttttttggtcagaatgtgacgcaggttagcgtgcttgtgcttaaaaccacctttaccggtttttttgaagcgcttagcagcaccgcgtacggtcttaatttttggcattttaataacttccacttcgcattgttaataaacgaaacaaaggcgaacaaagcctgtgaagcccgaaggctccacagacagtgctacttgaaggccttactgtttcttcttaggagcgagcaccatgatcatctggcggccttcgatcttcgttgggaaggattcgaccactgccagttcttgcaaatcgtctttcacgcgattaagcacttccataccgatttgctggtgcgccatctcacgaccgcggaaacgcagcgtgattttggctttatcaccctcttcgagaaagcgaatcaggctgcggagttttacctgatagtcgccttcatctgtaccaggacggaatttaatttccttaacctggataactttttgctttttcttctgttccttagaagacttgctcttttcatagaggaatttgccgtaatccattatacgacaaaccggcggctcggcgttagggctgatctcgactaagtctactccggcttcttctgctttctccagagcttctctcagactcacaataccaagctgctcgccttccagacctgttaagcgaacttcctgggcgcgaatttcgccattgatacggttagggcgcgccgtttgaactcgttttccgcctttaataccttattcctccaattgtttaagactgcggctgcgaatctcttgttgcagcttctcgatcacttcatttacgtccatgcttcccaggtctttaccacggcgggtgcgaacggtaactttgccactttccacctctttatcaccacagaccagcatatatgggacgcgacgcaaagtgtgctcgcggattttaaagccaatcttctcatttctcaagtctgctttaacacgaatgcccgcattacttagtttttgcgtcaattcgttaacgtattcagactgactatcggtaatattcatgataacaacctgaaccggcgcaagccaggtcgggaagaaaccagcgaactcttcggtcaggataccgatgaaacgttccatgctccccagaattgcgcggtgaatcattaccggtactttacgttcattgtcttcgcctacataagaagcgctcagacgagacggcaaagagaagtccagctgtactgtaccgcactgccatgcacgatcgaggcagtcatacagggtaaattcaattttcggaccgtagaaagcgccttcacccagttgatattcaaacgggatgttgttttcttccagcgcaaccgccaggtccgcctcagcacgatcccacatttcgtcgctgccaatacgtttttcaggacgagtggagagtttgacgacgatcttctcgaagccaaaagtgctgtacatatcatagactaaacggatacatccgttaacttcatcgcgaatttgttcttcagtacagaagatatgcgcgtcatcctgggtaaatccacgcacgcgcatcaggccatgcaggctaccactcggctcgttacggtggcagctaccaaactcggccatacgcagcggcagatcgcgataagacttcagcccctggttgaaaatttgtacgtgacccgggcagttcatcggcttaatgcagtattcacggttctcagaagatgtggtgaacattgcatctttgtagttgtcccagtgaccggttttttcccacaggacacggtccatcatgaacggacctttaacttcctgatactggtactctttcagtttagaacgaacaaacacttccagttcacggaagatggtccagccgtcgttgtgccagaataccatacccggcgcttcttcctgcatatggtacaggtcgagctgtttaccgattttacggtggtcgcgtttcgcggcttcttccaggcgctgcaggtaagcgttaagtgcttttttgtctgcccacgccgtaccgtaaatacgttgcaacattttgttgttgctgtcgccacgccagtaagcccctgccgttttcattagtttgaaatgatggcagaaacgcatgttcggtacgtgcggaccgcggcacatatcgacatattcttcatggaagtacagacctggcttgtcatcatgggcgatgttttcgtcaagaatggagactttgtagctctccccacggttggcgaaagtttcacgcgcttcgtgccagctgactttcttcttaatgacgtcgtagtttttctcagcaagctcatgcatccgcttctcgagtgcttcgacatcttcctgggttaacgtgcggtcaagatcaacgtcgtaataaaaaccgttgtcaataaccgggccgattgccattttggtatgcggccaaagttgtttaatcgcgtgccctaacaggtgcgcacaggagtgacgaatgatctccagaccttcttcgtctttggcggtaatgatgctcagttgtgcgtcgttttcaatcagatcgcaagcatcaaccagttcgccattaacgcgccctgcgatacaggctttcgccagacctggaccaatgtccagcgcaacatccatggggcttacagcgtgatcgtaatggcgttggctgccatcaggaagagttataacaggcattttatatccttatttgcagtggtgacccacacgaaagatcacatacaaagaaaaatttgtttattaacagttcattgcgaaaccatctagccaacaaatgctaaattggttcgcaatcaggtacacaaatgaaagacattaacctctcaccttccacccggttgagcgatgttaacactaaaaaaagggagattgtacctttccgtttcacattgattcgattcgcaattcgtttgtagtgagtacaccagcaaaacgcttaaagaacaactgataacatcacggtgcgtctgaaaggtttactgcgagcggatttacagcagcataaactgaatccagcaaagttcgttgcgtgatttggcggtagtattttaaacgctcatgagattaatgacgaagtggtcatatcacaatgataaaagtgacacaattcttataacaatttttcgtgcacatttcgttctggcgataataattaatcatcatcctcaaaacctccagatatatataaggcgaacagattatgagtcaaaacgatatcattatcagaactcattataagtctcctcatagattgcacatcgatagcgacataccaacaccttcatcagagcctattaatcaatttgcgcgccagctcatcaccctacttgatacctctgacttaagttcgatgctgtcatactgtgttactcaggaatttaccgcaaactgtcgaaaaatatcacaaaattgttattccactgccctttttaccattaactttgccacttcacccatccatacagaaaatatactcattacattacactataaaaaagaaatcatttccttattactggaaaccacgcctattaaagctaaccatttgcgaagcatactggattatattgaacaggaacagttaactgctgaagatcgtaaccattgtatgaaactgtctaaaaaaatccatagagaaaaaaactatacacccaacagtaaatctcaatggtagtgcatgttttttgcaatctccttctgacgctattttttgtcgccatctgtcattgcaatacgcccttgattcattgagaaatggaaaaggcaaagtcaacctgattaaacattactcctccgttgaatccatacagcagcatgtccccttagtccgggacgcggagttcagagcattacttcgccatcctcctgcagggagtcgcgttatcgcgagtaaggattttggcttcgctttagatattttcttttgtcgaatgatggcaaacaatgtcagtcatatgtccgcgattttatatatagacaatcatactttgtcagtaaggctacgaataaagcagtcagtgtatggacaattaaattatgttgtgtccgtttacgacccgaacgataccaacgttgccgtcagagacacccacaggacagcacggggctttctttcgcttgataagttcatcagttcaggtcccgatgctcagacctgggctgatagatatgttcgcaactgtgcaattgctattctgcccctattacctgtgggagttccaggggctattttcgcgggtattgcatcacgaatgccatttgcccctatacatccatcggcaatgttgttaataatggctacaggccagtctcaacagcttattacattattcaaacagttgcccatactccctgaaaaagaaatcattgaaataataactgcgcagaatagcgttggtacacctgctttatttttggctatgatgaacggacatactgacaacgtgaaaatatttatgcaagaaattcagtcactggtagataatcacatcattcatgaagataatctggttaaattactgcaaactaaaagtgctaacgaaacacctggactttatatctccatgttgtatggattcgatgaaataatcgatatctttctgaatgcattaaccactccaatagcacaagagcttttaaacaaaaaactggtgatgagtattttagccatgaaaatacatgatggtgagccaggattatacgccgcaatggaaaataatcaccctttgtgtgtcacacggttcctctctaaaattaatggcatcgcctttaaatacaagttgagcaaagctaacatcatggatttattaaaaggagctacagcacagggaacccctgcattatacatcgccatgagcaagggtaatgaagacgtcgtgttatcttatatatcgacgctgggtgcttttgcaaaaaaacattcttttagtcaacatcagttatttacactattggccgctaaaaatcatgacaacatgtcagctgttcatatagccattcatcataagcattataaaactgtagaaacatattatgctgctattaatgcaatcagccaaagcctgagttttagtgctgatgaaataaagacgtatttataaccagctatttacgatatatatcgatacataattttatttttttcataaaacgcagaaacagtgaccatgtgcacaacgccacccgacggctgtaataacaaaaaatcccttgatgcctgtcccttttgttacactccgttatcacgcacaagagatatgcaggacactggtatgccgactaaacgctttgataaaaaacactggaagatggtggtggtgctactggcaatctgtggcgctatgttgttgctacgttgggcagcaatgatttggggctgagcagtgacaaacgaagacagccagaccgcataacacggtccggcagataattttacatgctgtagcccaggcttaaggttgtccgacggtcggtatgttccggtgcagactctggaggttcagagttccatgtgacgttgtaagccaccttcagtccaaaatgttcattaatagcaacatttaatgcgctttcggagttcagcgttgtgtcttccgcgccaaagacgctaacaccctgcgtaaatttagcgttgtcagtcaactgccatgcataagccccggaggcatagcccagcggctgggtttcactggcattgtcggtatatttgtcgtaacgcacacctggaccgaattcaaagcggaaactgtgtaccgggccattcaaaaactgacgaccataacccgcggtcaacacatcgcgctctcgatagccgttataacggtctgtcagccagcttgcctgaccaaataaatagtcataatcagttaaattaaaacggctacgcccgcccgccgcatatttttcactagaacgctcatcattagaagaagtattactggcgttcccccacaggctccaggcagtggtgtgtccataccaggtcatggtggtgtcagccgtaagactggagcttttcgtattgccactttgtgcaagatatcctgcgttcagattaccttcgaaaggttttttagcgctggcaggatcatccatgacagtaaaaacggaatcatcggcagctgcattcagactcgcaaacatgccccccgccaacataacgatggcaggaactgtcttcaaaagcttcatttatcaagagtccgtacaacaaaaaaagagaccatcgcggtcccggaaactttcttaaggatcaaagattagcgtccctggaaaggtaacgaattataaaaaggcgcgaataacttagcaatgtattcttatttcattttttgaataagcatgtggcgaaaacagatttttatttatatatatttatctgcaaaattttaaataaagctccaataaatcatattgttaatttcttcactttccgctgattcggtgccagactgaaatcagcctataggaggaaatgatggtacgtatctatacgttgacacttgcgccctctctcgatagcgcaacaattaccccgcaaatttatcccgaaggaaaactgcgctgtaccgcaccggtgttcgaacccgggggcggcggcatcaacgtcgcccgcgccattgcccatcttggaggcagtgccacagcgatcttcccggcgggtggcgcgaccggcgaacacctggttagtctgttggcggatgaaaatgtccccgtcgctactgtagaagccaaagactggacccggcagaatttacacgtacatgtggaagcaagcggtgagcagtatcgttttgttatgccaggcgcggcattaaatgaagatgagtttcgccagcttgaagagcaagttctggaaattgaatccggggccatcctggtcataagcggaagcctgccgccaggtgtgaagctggaaaaattaacccaactgatttccgctgcgcaaaaacaagggatccgctgcatcgtcgacagttctggcgaagcgttaagtgcagcactggcaattggtaacatcgagttggttaagcctaaccaaaaagaactcagtgcgctggtgaatcgcgaactcacccagccggacgatgtccgcaaagccgcgcaggaaatcgttaatagcggcaaggccaaacgggttgtcgtttccctgggtccacaaggagcgctgggtgttgatagtgaaaactgtattcaggtggtgccaccaccggtgaaaagccagagtaccgttggcgctggtgacagcatggtcggcgcgatgacactgaaactggcagaaaatgcctctcttgaagagatggttcgttttggcgtagctgcggggagtgcagccacactcaatcagggaacacgtctgtgctcccatgacgatacgcaaaaaatttacgcttacctttcccgctaacaaaaacattcccccagcattgggggaatcatcaccaacctgtcggcaacgcgtttctccgactatgctcaaaagtcatgtgataacaaaggggtgaactatggccagtggcgatcttgtccgttatgtcataaccgtcatgttgcatgaggatacattgactgaaattaacgagttgaataattacctgactcgcgacggttttttgctcactatgacggatgatgagggaaatatccatgagctgggaactaacacttttggacttatcagtacccaaagtgaagaagaaattagagaactggttagcgggcttacccaaagtgcaaccggcaaagatcctgaaatcaccatcacgacctgggaggaatggaatagcaacagaaaataaatggtttttgggcaataatcagtctgtggtgtgcgttagctcgtgtttttacaccgcattcttgcgctaaccttatgatctggcagacaacatgggagagacatcatgtggcaggcaatcagtcgtcttttgagcgagcagttaggtgaaggcgaaatcgaactgcgtaatgaactgcctggcggagaagtccatgccgcatggcatttgcgctatgcaggacatgattttttcgtcaaatgtgatgaaagggaactgcttcccggttttaccgccgaagccgaccaactggagttactgagccgtagtaaaaccgtcaccgtgcctaaggtttgggcagttggcgctgaccgtgactacagttttctggtgatggattatctcccacctcgtccgctggatgcgcatagcgcatttattcttggtcagcaaattgcgcgtttacatcaatggagcgaccaaccacaatttggccttgatttcgataacgcgctctccacaactccacagcccaacacctggcaacgtcgctggagtacgttttttgctgaacaacggattggctggcagttggaactggctgcagaaaaagggatcgctttcggcaatatcgacgccatcgtcgagcatattcagcagcgtctggccagtcatcaaccgcagccttctctgttgcacggcgatttatggtccggcaactgtgcactgggtccggatggcccgtacattttcgacccggcctgctactggggtgaccgagagtgcgacctggcgatgttaccgctgcatactgaacagccgccacaaatctatgacggctatcagagtgtatccccgctacctgccgatttccttgaacgtcaaccggtttaccaactctacacgctgttaaatcgtgcaaggttatttggcggtcagcatttggttattgctcagcagagtttggatagattattagcagcatgatatgggttgaggataatggccgctccgtgcggccttttgattaaataaacccaagcagagaaaagaacacataacctgcagcaatacaaataaccggcaggatatacagactgaaaaactgcaggaaaatagtatggtgcggaacaacaatacgggactcaatttgttcacgcgttagcccctcttcccctttggctttttccagaatgagttgatcttcaacaccttcccgcaagaagcgcgcctggcgactcatccgggcaccggaatcctgcaacgccagtccgacaaaaatcaggatgaaaatcacccagaacataacgttcacgccaccattaaaattgggcgtcggggagttataccagaatagattcaaaaaaggcgtattcgcctgcatcatatcgatcatgacatgagtaaagtcgagcatgaccgcattaatgccttccttgttttcctgccgggtattcataaatttcagcaaagaaatcaatgtagagatcaatgcaggtataaaaatcacccaacccaaaatccttttcaaaacagcaatgcgtccagcttgttgatacgtcatgagttctccttgattaagacgcgtcgtttcacttagtttacctgtagatatctgttttcgcccattctttaaaggcgatatgataggcgcttaatcataagcacggcttaataccttacacataatgctctaaaggagaggttgtaatgagtaccccgcgtcagattcttgctgcaatttttgatatggatggattacttatcgacagtgaacctttatgggatcgagccgaactggatgtgatggcaagcctgggggtggatatctcccgtcgtaacgagctgccggacaccttaggtttacgcatcgatatggtggtcgatctttggtacgcccggcaaccgtggaatgggccaagccgtcaggaagtagtagaacgggttattgcccgtgccattagtctggttgaagagacacgtccattattaccaggcgtgcgcgaagccgttgcgttatgcaaagaacaaggtttattggtgggactggcctccgcgagtccactacatatgctggaaaaagtgttgaccatgtttgacttacgcgacagtttcgatgccctcgccagcgccgaaaaactgccttacagcaagccgcatccgcaagtatatctcgactgcgcagcaaaactgggcgttgaccctctgacctgcgtagcgctggaagatagcgtaaatggcatgatcgcctctaaagcagcccgcatgcgttccatcgtcgttcctgcgccagaagcgcaaaatgatccacgttttgtattagcagacgtcaaacttagtagcctgacagaactcaccgcaaaagaccttctcggttaatgaccaggggcagtgatctcgctgcccctggttctttatctgaaattgcattcaactgacggattaatcgtcaatttaagagaaagagttacaccgtcaccacttccgtgcactgtataaaaatcctatactgtacgtatcgacagtttagtgagttttatcatgacggcggaaggtcaccttctcttttctattgcttgtgcggtatttgccaaaaatgccgagctgacgcccgtgctggcacagggtgactggtggcatattgtcccttccgcaatcctgacgtgtttgttaccggacatcgatcacccaaagagctttcttgggcagcgattaaaatggataagtaaaccgatcgcccgcgcttttgggcatcgtggttttacccacagtctgctggcggtatttgcgctgctggcaaccttttaccttaaggttccggaaggctggttcattccggctgatgcgctacaaggaatggtgctgggttatttgagccacatacttgccgatatgctgacacccgccggtgttcccctgctctggccatgccgctggcgtttccgcttgcctatcctggttccccaaaagggcaaccaactggaacgttttatctgcatggcattatttgtctggagcgtatggatgccccatagtttacccgagaacagcgctgttcgttggagtagccaaatgatcaataccttgcagatccagtttcatcggcttattaagcatcaggttgaatactaaaaaggcaaaaatcacctttctggaataagcaattccatttgaatataagagccagctcacagttctgttaatcttgcgccaacactatgactgctacgcagtgatagaaataataagatcaggagaacggggatgaactttccattaattgcgaacatcgtggtgttcgttgtactgctgtttgcgctggctcagacccgccataaacagtggagtctggcgaaaaaagtgctggtgggtctggtgatgggtgtggtttttggccttgccctgcataccatttatggttctgacagccaggtacttaaagattctgtacagtggtttaacatcgttggtaacggctatgttcaactgctgcaaatgatcgttatgccgttagtcttcgcctctattctgagcgcggttgcccgtctgcataacgcatctcagttaggcaaaatcagttttctgaccatcggtacgcttttgtttaccacgctgattgcggcgctggtcggtgtgctggtcaccaacctgtttggtttgacggctgaaggtctggttcagggtggtgcagaaactgcacgtctgaacgccattgaaagtaactatgttggtaaagtctctgatctgagcgttccgcagctggtcttgtcctttatcccgaaaaacccgtttgccgatcttaccggagccaatccgacgagtattatcagcgtggtaatttttgccgcattcctcggcgtagctgcattgaaactgctgaaggatgatgcgccgaaaggtgaacgcgtcttagccgctatcgataccctacaaagctgggtgatgaaactggttcgcctggtcatgcagttgaccccttacggcgttctggctctaatgaccaaagtggttgcaggttctaacttgcaagacatcatcaaactgggaagtttcgttgtcgcgtcctacctcggtctgctgattatgtttgcagtgcatggcattctgctgggcattaatggcgtgagtccgctgaagtacttccgtaaggtatggcctgtgctgacgtttgcctttaccagccgttccagtgctgcgtctatcccactgaatgtggaagcacaaacgcgtcgtctgggcgttcctgaatccatcgccagtttcgccgcctctttcggtgcaaccattggtcagaacggctgcgccggtttgtatccggcaatgctggcggtgatggttgcgcctacggttggcattaacccgctggacccgatgtggattgcgacgctggtcggtattgttaccgttagttccgcaggcgttgccggtgtcggtggtggtgcaactttcgccgcactgattgtactgcctgcgatgggcctgccagtaaccctggtggcgctgttaatctccgttgaaccgcttatcgacatgggccgtacggcgttaaacgttagtggcagcatgacagctggcacgctgaccagccagtggctgaagcaaaccgataaagccattctggatagcgaagacgacgccgaactggcacaccattaattcttatgctggcaacggtccgttttgtataggggccgttgccttactttttaaatgttccatcgcggcgatgcatacactctcatatttaaacagatcgtcagcgaaaaaaatgtccaacttatcaatacattcctggctcaaactatgtgcctgtaggctgaagcttaaaacctcatacccgagacgttttctaagactactatctggaatactcataatatcttcaagcacaccacttcccattcccggaagatttagtggattaaaaagaagattgatattaagcatacttattatgctaggaaactttaggagactctcatttttttgaatcgcagcaaaaatgctcccgacaggatgtatataattttgttcatagtatatagtccttaaatagtgaataaccaacctgttttttatactgatcaaattggtcattttttctgggcgaaatacagaagtgacatccattccaataaaatctttatttatacctcttatccgaatttcactaccataaagattattaattattactctatatttaacattgtcctgcagatatgtatcaaaactaagtgctggcgctcctggcttactggcatcatagttaatgttagacatataggcaatcatataattaaagttactttctgctatttcatcgcagtcacattgacccgtacttataaagaaagtgagtgctgtcatagtagactgcagcctttctttaaaagagtcgaaagccaggcttttaatatttaaatcaccataattactctgtattaagtttgtagaaaacatctcccgcctcatattgttaacaaaattattatctcatttaaatctaagtcatttacaatataagtttaagagcgacgccacaggatgaactatcaaaaatagctcatcatgattagcaaaacttaaccattttaaaataaataaacaattaaagaaaaaagatcacttatttatagcaatagatcgtcaaaggcagctttttgttacaggtggtttgaatgaatgtagcaacgaaatacagaatttcaggtcatgtaactcccggcaaaaccgggaggtatgtaatccttactcagtcacttccccttcctggcggatctgatttgcccaacgttgggcagattcaggcacagtaaacgccggactgcgcagaaaactctctcccatcagtacaaacgcaacatatttgccacgcagcatccagacatcacgaaagctatccatctttatcgcatgttctggcggcgcgggttccgtgcgtgggacatagctaataatctggcggttttgctggcggagcggtttcttcattactggcttcactaaacgcatattaaaaatcagaaaaactgtagtttagccgatttagcccctgtacgtcccgctttgcgtgtatttcataacaccgtttccagaatagtctccgaagcgggatctggctggtggtctatagttagagagttttttgaccaaaacagcggccctttcagtaataaattaaggagacgagttcaatgagccaacataacgaaaagaacccacatcagcaccagagtccactacacgattccagcgaagcgaaaccggggatggacagtctggcacctgaggacggctctcatcgtccagcggctgaaccaacaccgccaggtgcacaacctaccgccccagggagcctgaaagcccctgatacgcgtaacgaaaaacttaattctctggaagacgtacgcaaaggcagtgaaaattatgcgctgaccactaatcagggcgtgcgcatcgccgacgatcaaaacagtctgcgtgccggtagccgtggtccaacgctgctggaagattttattctgcgcgagaaaatcacccactttgaccatgagcgcattccggaacgtattgttcatgcacgcggaagtgccgctcacggttatttccagccatataaaagcttaagcgatattaccaaagcggatttcctcagtgatccgaacaaaatcaccccagtatttgtacgtttctctaccgttcagggtggtgctggctctgctgataccgtgcgtgatatccgtggctttgccaccaagttctataccgaagagggtatttttgacctcgttggcaataacacgccaatcttctttatccaggatgcgcataaattccccgattttgttcatgcggtaaaaccagaaccgcactgggcaattccacaagggcaaagtgcccacgatactttctgggattatgtttctctgcaacctgaaactctgcacaacgtgatgtgggcgatgagcgatcgcggcatcccccgcagttaccgcaccatggaaggcttcggtattcacaccttccgcctgattaatgccgaagggaaggcaacgtttgtacgtttccactggaaaccactggcaggtaaagccagtctcgtttgggatgaagcacaaaaactcaccggacgtgacccggacttccaccgccgcgagttgtgggaagccattgaagcaggcgattttccggaatacgaactgggcttccagttgattcctgaagaagatgaattcaagttcgacttcgatcttctcgatccaaccaaacttatcccggaagaactggtgcccgttcagcgtgtcggcaaaatggtgctcaatcgcaacccggataacttctttgctgaaaacgaacaggcggctttccatcctgggcatatcgtgccgggactggacttcaccaacgatccgctgttgcagggacgtttgttctcctataccgatacacaaatcagtcgtcttggtgggccgaatttccatgagattccgattaaccgtccgacctgcccttaccataatttccagcgtgacggcatgcatcgcatggggatcgacactaacccggcgaattacgaaccgaacagcattaacgataactggccgcgcgaaacaccgccggggccgaaacgcggcggttttgaaagttaccaggagcgcgtggaaggcaataaagttcgcgagcgcagcccaagctttggcgaatattattcccatccgcgtctgttctggctaagtcagacgccatttgagcagcgccatattgtcgatggtttcagttttgagttaagcaaagtcgttcgtccgtatattcgtgagcgcgttgttgaccagctggcgcatattgatctcactctggcccaggcggtggcgaaaaatctcggtatcgaactgactgacgaccagctgaatatcaccccacctccggacgtcaacggtctgaaaaaggatccatccttaagtttgtacgccattcctgacggtgatgtgaaaggtcgcgtggtagcgattttacttaatgatgaagtgagaagcgcagaccttctggccattctcaaggcgctgaaggccaaaggcgttcatgccaaactgctctactcccgaatgggtgaagtgactgcggatgacggtacggtgttgcctatagccgctacctttgccggtgcacctagcctgacggtcgatgcggtcattgtcccttgcggcaatatcgcggatatcgctgacaacggcgatgccaactactacctgatggaagcctacaaacaccttaaaccgattgcgctggcgggtgacgcgcgcaagtttaaagcaacaatcaagatcgctgaccagggtgaagaagggattgtggaagctgacagcgctgacggtagttttatggatgaactgctaacgctgatggcagcacaccgcgtgtggagtcgcattcctaagattgacaaaattcctgcctgatgggaggcggcgcaattgcgccgcctcaaatgatttacatagtgcgctttgtttatgccggatgcggcgtgaacgccttatccggcctacaaaactgtgcaaattcaatatattgcaggaaacacgtaggcctgataagcgaagcgcatcaggcagttttgcgtttgtcagcagtctcaagcggcgcagttacgccgcctttgtaggaattaatcgccggatgcaaggttcacgccgcatctggcaaacatcctcacttacacatcccgataactccccaaccgataaccacgctgagcgatagcacctttcaagctcgcacttgtcaacacatccagctccgttaagcgtgggaaacagtaagcactctgacggatagtattatcgataaacgccggatgacacatcacctccaggctacgatcaccccgatggcctgcgtcatccagcacttgcaggaacaggctctcactgatctcttcaccgtagaatgcactgctgaatccctgggtagtgcgcaggttgaccggcaaatcaaacgccatctgacgatccgcccgcaacgcaatgccctgctctgccgcaaacctggcaacaatcgggaaaatctgcgggaacatatgcacatgatgatggctatcaagatgcgtaggtttgcgtccaaatagctcaatgaaacgcaaatactgactgacaagctcctgagtaatttcttccagcggtaaagcatcttcttctgccaactgccagatccattttcccagcacaccatcgcgggttaaccccggcatagctgtcagtggcttacccatagtaaggacaaagtgcatccctatggccagactcggttcatcacgactcaactgcaccgcatggtcaatagcctgcccattcaccagcgccgtcgtgctcgtgacaatcccattgcgacaggcctcgataatgccgtagttctgacctttgcttaagccaaaatcatcggcattaacaatcagtaagcgttccataatcagcctcggttaatgtgcttttttaagctctgcgatgcagtcggcaaagtttggcagccatttctcgtgcgccagaatcatctcgcgtgccagcagctcagcatcgcgatcggaatgcaccaacggactaaggtttagcgccagtaacacatcgttaaattctccgctaagtgcggcgttactggcagcaatctcgaagcctttaatggtgtgaatcagccccattactttatcatcgaaatgcgtaatgcgcggatgtggcgtcgcgccatcgcgccccagcttacaggtcatttctactgcccagtctgccggaatattatcaatctgcccatgatgcgggatattaacgtaatgttctgcttgcttgtcgttgtagatagcgttgatcacttcgcatgctgcatcagagtaataagccccaccgcgctgttccagttctttcggcttaactttcagctcaggatttttatacagctcaaaaagttgtttctcgactttctgtactacctgcgctcgtgcgccgcctttgtagtattcgcccatttcaatagccagcatctctttctgcttgaagtaatacagcagataagaacatggcagcagattcaagctacgaattaagccctcactaaatggcagatcgaaaatattttttacagaggacgcttttaactgcccactcgccacaccatcaagcaattcggcaaagcggctcttgccatttatcagcacatccttaatgaacaccatatggttgaggccgaacaaatcgatagataaatcatcgctgtctttcagcatcagaacatcgcgaataaacatcttcatgccgatcggaatattacacacgccgataaagcgtttaaatccggtatgacgataaacggcttcagtgaccattcccgccgggttagtgaagttaatcacccatgcattcggacaaagttcttcgacatcttttacgatgtcaaaaatcaccggaatggtacgcagacctttaaacaaaccgcccgcgccgttggtttcctgaccaagataaccatgacttaatggaatacgttcatccagttcacgcgccggtaattggccaacgcgcagttgggtagtaacgaaatcagcatctttcaatgcttcgcggcgatccagcgttttataaagcttcatcgggacgccagcgttatcaatcatccgttggcagagatcgaaaataatatccagtttcggtttaccaccttcgacatccaccagccataattcgctgaccggcaattcgtgataacgcttaataaatccttccagtaactccggggtatagctgctcccgccaccaatagtgacgacttttaatttctggctcataatttctcccttcagtacagaatactgatatctggcatatctgcccccccggacataaataatccagcaacaggacagatatgtgaattgtcaggtataacgacttactgattaaattcagtcaatttcttacgatagctcttaggcgtaaaggacgttaatttcttaaacgttttaataaacaaactcgggctactataaccggcctcaaacgcaatatccgtcacactatagttggtcatttccagttgttttttggcaaaattaatacggatttcattaataatctgcattggcgttttgccataatatcgttgagtcgctcgcgtcaaatattcctgacttttggcactcaacgccaccatattctccagcgcgctttcactaaactgctctttatcatgcatcttttctaccgtacttttcagccactgcggtacatcatcaatcacctgttcttcgcggtaatgacgtaaacggttaatgacataaaaagtaaccatctcaacaaactcttccagccctgtttcgcggaaattcaaactagaaatcactgtttccacataggtgagaaaagcgttattggtccggtatacctggctagcgacaaagcaataaggcaacaatggcaggtaatgctgctcaaaaaagcgtttactgatcccaacgttcaatatgcgcgtggcaccaaactcataaaaactttgatggtggctacctaacggaataaaaacaaaatcgccccgttccagtaacacgcgcttaccgttaatctcctggaaataacgcccggttaataccagagtaaattcataatagtcgtgctgatgcagtccgctgatactctcagttttgttatagataaacacatggaagtttttgccattaaacaactgctgttctcgggcagtggcaatttccggcgcgttaatcactggctgcatcatcgactccttatgccttcagtttttcatgaagctcaattaattcagtaatcagttcacgcgcaagcatggacgtcattaaatgatcctgagcgtggaccagcaccagactcactttcatcttaccttcgcccgcatcgccttcaatcagtttcgtctgtaccagatgcgcttcattcaatgccatccgactctgatccatcatggcttttgctgcggcaaaatcgccctgcttcgcctgtttcagtgccgcatacgccaggctgcgcgcttgtccggagttgatgatcagccccatcaccacttcttccagctcttcagcttccgtttgcgtatcgggaatgttatcgagatccatcatacatcgttcctctcttttcttaccggcacgattacccgtaccggcatcgattaaaatttcagggcgttagcgatatcttcttcgctctcttctttatcaatcgcattttgtgctttgttagccaccacaacaaagggcagataaattaacgttgcgatgccaaggttgaagagtgcgaccagcaatgcggcgacgctaccgttggtgttaaagaaggctcccagaccggttggcatggtccacggtgcaatattggtcaccggaggaataatgcccatgtagtacgctgcgagggtgattgccgccagaatcggttgtaccagtacaaacgggataaacatcaccgggttcatgataattggcagaccaaacagaatcggttcgttaatctggaagatgccggacggcagcgccagttttgccacctgacgataatcagcacggcgagaggcgataaagatagccaggatcaggcctaaagtcgcaccactgcccccaaggaaaataaaggagtccagcatcggcttggcccagatatggaaggtcttaccggctgccagcgccgcttcgacggaaccatattgctgataggtcgcgatattttccagtgcccacggcgtcataatgccgttgtccagtgcggtcagcgccagcgcgccatgaataccgaagaaccagagcagtggaacaaagatcacataggcccagcccaccacgctacccaagcttgccagtggggtactgatggtatccataatgatctgatggaagttggtgccccaggtattcaacgcccaggcaataatccccatcacggaaagaataataaagccgggaattaatgcgctgaaggaacggcttacactagcaggtacgctgtcgggcagtttaatgacccaattgcggcggacaataaaggtaaacatttctgccaccaccaggccaataataatcccggagatgatattcgccccacctaaccagtttgcaccaaccgcataggcctcaccgacactatatggggtgacggtcataaatgctgcaacggataacaacccagccgccagcgcatcgactttacgctcttctgccagcgccatgccaataaagaacggtgccattaaagacattattcctaatgttccgttatatacgttgccgccaatacctttcagaccattaagtgtttcaatggtactggcgtcgaggcgaatacctaaggaataaaaaaagctcccctccccaaagcttagaaaaacgttgttaattaatacaaacatggcccccgcaagggttaacggcattaagcgaataaagccatttttgattgcattaacgtgtggctgctttcctattttaactgcaaaagggaggagtaccttttcaaggcttgcaataacattactcatagaaaaatacccttaaaaaccgcaatttaaatattgcggtattgatttatgaaataactctttgacgggaaaatttaaaataaattaatttgctgcggcttttttaatcgctgcaaccgcagccttaagcacgcctaaaccatcgactttgccataaagcaggctgtcaattacttcaaccggtttgttgggtaacaaacgctggatttcgggcaacatataagcaatctgcggccctaataacacgacatcggcattctgacctttttcaccagccagtgtttccggaaatgcttcaataatgaccggaacttcatatttttctgcctgtgcgcgcattttacttaccagtaaagaggtagacatgcccgcagaacaaaacagataaatgtgtttcttttccataaaactgccctcatcgacgattatctgtcagccagacactccgcaagccttaacctgcttccatgctctgggtaacttgcgaaaccaacatgactttttttgtggctgaaaggagtatacggtatagacctgagcaatagtatttctttgaccttataaattgtttctccttgacctgtggttatgaccctcttcacatttcgggcaaataattcgcgaagataattaagaactcaggccaaaaaaaaccggcgcaatggccggtttccgttgttactcaagctttcagacgaattgattacttcgcagcctgtggatcagtgtcgtattcagcacaggtctgataaccggagttgatgacatatccggtatcatctaacgcgacaaagtaggtttctgctttaccatcacgttgacccaggatgtaggtctggcaagtaccgcgagcatggatcatgctcacttcagagctaggtttacccgcaatttgtgcaacctgcgcccggctcatgccttttttgacgtctttcaccacaggctgtacaaactggtctttggtacgatcataagccgtacaacccgccagcatggttaataccgccgctgcactcagaattcctgccatattcttgttcatattccgtcctcttgtttatcagcgtgttagataagcctggaatacattgggcgctttttcaagcccgtgaacgaaacggctccgctttcagaggattcctgtatgacgttttaaccaccattcagcccgctgtcgcttgtcgtttcagtagcaacgggttagctttaaggaagttttgtcttttctgtctggaggggttcaatgacattgcaacaacaaataataaaggcgctgggcgcaaaaccgcagattaatgctgaagaggaaattcgtcgtagtgtcgattttctgaaaagctacctgcaaacttatccgttcattaaaagtctggtgctcgggatcagcggcggtcaggactccacgcttgccggaaagctgtgccagatggcgattaatgagctgcgcctggaaaccggcaacgaaagtctgcaatttattgccgtacgcctgccctatggtgttcaggccgacgaacaagattgccaggatgccattgcctttattcaaccggatcgcgtattaaccgttaatatcaagggcgcggtattggccagcgaacaggcattgcgggaagcaggcattgaactgagcgattttgtccgtggcaatgaaaaagcgcgtgagcggatgaaagcacaatatagcattgcgggtatgaccagcggtgtcgtggtgggcaccgatcatgcagcagaagccattaccggattcttcactaaatatggtgacggcggtacggacattaatccgctgtatcgtctcaacaaacgtcagggtaaacagttactggcggcattagcttgcccggaacacctttataagaaagcgccaacggccgatctggaagatgatcgcccttctctgccagatgaagtggcactcggcgtgacctatgacaatatcgacgactatctggaagggaaaaacgtacctcaacaggtcgccagaacaatagagaactggtatctgaaaaccgaacataaacgccgtccgccaattaccgttttcgatgatttctggaaaaagtaataatttgcacatattggattgtgcgaaaaagagtaatttgttcacgccggatgcggcgtgaacgccttattcgacctataaaactatgcaaattcaatacattgcaggagtcgaataggcctgacaggcgtagcacgtcagacggtgtaacctttgtcatcgacccgcctcttttttaatcgcttcccgcctgttacactggatagataaccagcattcggagtcaacagtggtacggcgtttaacttctccgcggctcgaatttgaagctgcggcaatttatgaatatcccgaacatttacgtagtttccttaatgacttacccacccgaccaggggtgtatctgtttcatggtgaaagtgacaccatgccgctctatatcggcaaaagcgttaacatccgcagccgcgtcctttctcatttacgtaccccggatgaagccgccatgctacggcaatcccgacggatcagctggatatgtaccgccggtgaaatcggcgctctgctccttgaagcgcgattaatcaaagaacaacagccgctgtttaataaacggttgcgccgcaatcgccagctctgtgccctgcaattaaatgaaaagcgcgtcgatgtggtgtatgccaaagaggtggattttagtcgagcccccaacctgtttggcctgtttgccaataggcgcgcagctttgcaagcattgcagaccatcgctgatgaacaaaaactttgttatggcctgctgggactggaaccgttaagtcgcggtcgtgcatgttttcgtagtgcgctaaaacgttgcgccggagcatgctgcggtaaagagagccatgaggaacatgcgctacgcttgcgccagtctctggagcgtttgcgggtggtgtgttggccttggcaaggggcggtggcgctgaaagaacagcacccggaaatgactcaatatcatattattcaaaactggctgtggctgggggcggttaatagcctggaagaagcgacaacgttaattcggacacccgccgggtttgatcacgacggttataaaattctttgtaagccgctgctttccggtaactatgaaattactgaacttgatccggcgaatgaccagcgagccagttgattactgaacttgatccgggctatgaccagcgagccagttgatttcactgaacaacagtttaccttgcggttgtaaaagccgcagggtgtgcctgccatcgaaccagcacgcgccctggtcggtagtgagcaatttatcgcccagttgccacgccccgttaatcacaaacaccaccccgccgcgactgccaaaggtagtaaacgtacgttcggcaattctgactttcgccttacagacatccaggcgtgtcatgatgttgaaatccatgctcatctgccctgccgtcagtttcgcttttaccacctggtccgctgcaaaggcaaaaggctggaacggttttaaggtatggttaaagcggtctgcgctttcaaggagcatctcgccgccttccagcaacgtcactatcctttccatgccgggaaacaaagaaaactccccattcgccgcgatggatgcaatgctggcacgccagtaaaaatcacgttttgccggtgggaacgtgcaaatttcgcgcgtttcaccggcagcatttcgccacagattcacgctcattttacgcatatcaaagtattccatactcgctcccggcccgttcttttcattgttatcgttcaggtaaccgtggatggttatcggcaactcgggtgatttacgttagtggtgatcaggctttttttacaactgtttgagaagagaaaagaaaaccgccgatcctgtccaccgcattactgcaaggtagtggacaagaccggcggtcttaagttttttggctgaaagattattcagcagttgcaggcattttaccttttgccgctggacgttctgtcagacgcttctcaaaattagcattaaattgctttttctgttccggcgtcaggatgttgtaaattttgttctgggtttccatgtgcgccagcatgttagctttgcgctgttcttccatttttgcgatctgcgcttcagcttttactttatcgaaggtatcgctggcaatgatgtcatgcattgcgcggcgttcttccagcggcggacgtttcatctggtcacgctggcctttcatgatttcgcggatctgctgtttctgcgcgtcggtcaggttcaggtctttgaacatcatgtcctgatgcggaccgaacttgcctttgtggtgcatcatcggcttcgcgtcagccggtgctgcggtagtggtgtctgcggcatgggccaggttagccgcgccaagagccagggtagaggcaacaaacagtgcagttaatttacgcatattctatatccttcctttcagttatttattacggctttcttaagtagcgtgccgtgttgacgagattaactttactgactttagcgtcaattaatcagagcaacggtaaaacaatgaaagtgtaaaaaacacttttgcgccaattatggagaaaaaaagaaaatttgatggagagtgatgagagaatattacaacacgatgattttgcagagattatgaagaactataccggatgactggtgataaataaagcaaataaccaggattaatctgtattaatttataagaaagcaacttaatacccgcagaatgatttctgcgggtaagtattagcttattttttcgagcattaatcccgcgcgtaatcccaacgctaccaacggattagggaataacacatactctacatcatgggttacggtaaaacgttcctctccgtcctgcgccagcaatgttcctttctcaaacggcataaaattcagcgtgtcacttgccatatgcatttcgaaggacgggctgtggcgagtaatttggctaaccacccgataacggagcggcggtgttctcacgataccgacactctcaccagatagcagcgcagcaattgcgctggcagttactgcaaactggcgaagatcgttttgcccaaagggcaacgctttgccaagttccagcgtacaggccagcgcgccaaaatgtctggcgctgaaatgggtaaacgtaccaccaggttcctgatggaacaccagcgcctccagccccgccgcacccagccacgtcagaaatttctcgtcccagggaatgtcgcgttgcggtaatacaccgaactgcggatgcaaggagccacgaattgcggtatgtagatcaaggtgccagcgcacagattctttgccctggtcataaaaatcttccaggcactgttccagttcgcgcgcccgacaggtttctccgctttcagcaaatagctgccaacgaccgccaaacattcgattcatatcgctatggcaataacgtttcccttgcttcagcgcaggaggattcccgaggatcaccagcaaccgccaacgtaacgggatctcgccgtgagatatcgcgccaagcaacgcgtccagcatctccacaggtgccgtctcattaccgtgtattcccgcactaatcaccagtgcgccttgcggtggcgttaatggcgtcagttccagcacaccatcgcccagccagcgccagcgaacgccgttgatttctcgctcggtgataaccggttttttacccgttaaggtcagagcaagaaaattatccattgccccctccctcgcgctggaacggataaacgctaccgagattcagtaattggctcaatacatccagtgcttcccgcccttcgcgcagcaattgcgggtcggccagatcggcagcagtaaggcgatcgcggtagtaacgatccacccagtcattgagcgcattaaacagcgtatcgttcatcatcaccgccggattcaccgcccggcgttcttcttctgtcaataccacccgcaaccgcaggcacgccgggccgccgccattcgccatgctttcacgtaaatcaaagacttttagttcgctaatcgggttgtcagcggcaaggagttcattgagataaccccatactccggcgtgttcccgacactcctgaggcagcaccaacatcatggaaccatcatcgcggctcagcagttggctgttaaacagataggtagacaccgtatcagacacggaaacctgagttgccggaacttctatcgccataaaaccattgacccgcgcacgcaggtttgccagtaactgactctggcgagcgaacgcctgttggtggcaaaacagcacctggcggttactcacggcaatcacgtcattatgaaaaacgccctggtcgataacgtccgggttttgctgggcgaaaatcacctgttggggattcacctgattcagccttgccaccgcctcgctggcttcgcgagtctgtcgcgccggataacgggaaggccgggtatcattgccttcttctcgcccgtagacaaaaagttgcatacccggttcaccgtaatgaccgccgagacgattgtggtttgccgccccctcatcaccgagcaacgctacctgtggcaacgcgctatggacgctaaatttctcttcgtcgttaaaaatcgcttttaacaggctttcagtgacgggcgcttccaggctacggtgaaatttattgttcaggttggcaacggtgagatgcactttgccatccagcgtatcggcagatggcgcgatcgttgccgcattggctacccacattgggctagcggaactgacgctggaaagccagtgcggtgcctggcgtgcaactttttccagtacctgctcatcgctaccactgaatcccaactgacgcagcaccggaataaacggacgctcgtgcggcgggatcacggcctgggggaatcccgcatcggcaagggctttcattttcagtaagccctgcttcgccgccagtcgcgggttagacacctgaaaacggtgacgggtagaggcttcattaccaaagctcaggcccgcgtaatgatgcgtcagccctaccagcccgtcgaaattgacttcccaggcgttcatcgcaccacctcatcggaaaaatccagcccggggttaagcgtggcgggcaatgttaagctgtcgctctccaggctcgccatcggccatgcgcagtaatctgcggcataccaggcgctggggcgatggttaccggaagcaccaatgccgccgaatggcgcggtactggcagcaccggtaagcggtttgttccagttaacaatccccgcccgcgcctccagcaacagttgatcgaacttttcccgctcgggggaaaccagaccgcaagagagtccgaagcgagtgttattcgccattcgaatcgcttcatcgaaagtatcataacgccagacgcgcaataacggtccgaacacctcttcatctggtacgccagcaacgcctgtcatttcaatgatccccggcgtcagcaagcttgtccctgcttgtaataagcgcggcgcaagcaggggtcgtccgcccatcgcttccagttgctgccatgcagtaaccacctgctgtgcggcctgttcagaaatcagcccgccaataaacggctgcggttcgtcatcccagttgcccggcgttaatcgctggctgacggcaaccagacgagcaagaaacgcatcgccctgcgccccgcttttcagcaataaacggcgggcgcaggtgcagcgttgaccggctgtgacaaacgcgctctgaatggtcagatggacagccgcgtcgatatccgccacctcatcgataattagcggattattaccgcccatctcaagggcgagaattttctccggctgaccggagagctggcgatgcaactggtagcctgtattggcgctaccggtaaacagcaaaccgtcgagatcctccagcgcactcagcgcctgacccgtttcacgcccgccctgcaccaggttcagcacgcctggcggcaagccagcctgctgccataaacgcattaccgcttcgccactccacggtgtcagttcgctgggtttaaagataatggtgttacctgccagcaatgccggaacgatatgtccgttcggcaaatgaccagggaaattatacggcccaaacaccgccagcacgccgtgcgggcgatgtcgcaggctcgccgcgccgtccggcatttcactacgctgctcgccggtacgaacgtgatacgccttaatacttatcgcgattttattgatcatcgccgtcacttcggttgccgcttcccagcgcggcttacccgtttctctggcaataatcgcggttaattcggctttattgctttccagcagtgcggcaaagcgttcgacaacggcatgacgttcagcaaaactaagccgcgcccagcgcggaaacgccgcacgggctgcccgacaagcctgctcgacctgagcggcatcggcatcattgccttgccataacacctcgccgcttaccggattacgcttcacacggcttgcgccctggcccgttatccagtcaccgttaatccataaagtcatgctgttttctcctctgcgcacaggcgcaccagacgaacgcgatccccggcgtggcatttgagggcatccagttgtgcggcggttaaaatcaaacgctcggttgccggatcggtacgcaccagcaccacgcggaaatggtgataattttcattggcgaccaggcaggctgggaaatcgccctgcgcaggctgcccttctgccacttccaccagccgacttttacggatggcgcgcacgcggtcgatgtcacactcaagcgtcggcccaccgtcaaagatgtcgatatagttacggtagcgaaaaccttctttctccagcaccgcgcgggcaggcgcggtttgcggatgtacctgaccgatgacgtcctgggcttcctgggataaaaagtgggtatagatcggatgtttcggcatcagttctgcaataaatgccttttgcccggtgccgcagagaaaatcggcgcggctaaaatccatgctaaagaagcgtttaccgaggctttgccagaacggactatagccgtgttcgtcaatcaccccgcgcatttcagcaaccactttgtcattaaacttgtcgcgaaaagccgccataaacataaagcggcttttgctcagcaaatagccgttgccctctttgcgccagtccgggtcgagaaacagcgtgcacagctcgctgctgccggtgtgatcgttactgagaaacagcgtcggcaatgcgttatagacattcagctctttactggcgtgaaccaacgtgccgacgcgatagttgtaccagggatcgttcagcccaaccgccacctcaatggcacaaatccccgccacggtgcctgtctcgctatcttccagcacgaacacatagccctgctcacttttgggcagttcgccttgccaggttttgattgccctttcgatacgcgcgctaagcgtggcttcattggcgggaaggctcgtcaggccgccgcccgttttgctggcaagctgcatcagcgcgctgacatcacttcgctcaacgggacggatgaccatcatgatgaacctcggctaacaaattatttcaactactacctcggctaacaaagtgttcgcaagcagctgcaaagcgatccagtccggtcgtcacctcttcttcgctgacattgagcgcaggcgcaaaacgcaccacgttgccacccgcaatcagtaccatcacgcctgctttcgccgcttcctgagagatctgtttcgcttgcccggcgtaatcggcattcagtacacagccaatcagcaaacctaagccgcgaacttcactgaacaaaccatagcggtgattaatagtattaagacgctcaacaaaccagtcgtgacgctgtttaacgccattaagcatctctggtgtgttgatgagctccagcactttgcctgccaccgcgctggccagcggattaccgccataggtggtgccatgagtgccaacggtcatcacgcgggcgcactcttcggttgccaacaacgcaccgaccgggaaaccgccgcccagcgctttggcggtagttaacagatcaggcgtcacgccgtagtgcatataggcatacagttccccggtgcgcccgacgccggtttgtacttcatcaaaaatcaacagcgcattgtggcggttacacaattcacgcagaccttgtaaaaacgcgttgctggctggcaccacaccgccttccccctggatgggttcgacaatcaccgcacaggtagagtcgtcaatcagcgcgctggcagagttaatatcgttatatgcagcatgacgaatatccgccggcagtggcgcaaaatcctgactataggctggctgcccacccgcactgacagtaaacagcgtgcgaccatgaaacgcatttttgaacgccacgatgccgctcttatggctgccgtagcggtcgtgagcgaatttacgcgccagttttagcgccgcttcgttggcttccgcaccggagttacaaaagaagacgcgatcggcaaacgtggcgtcgatcaattttttcgccagtcgcagtaccggctcgttggtgtaaccgttgccggtatgccagaacttactcgcctgttcgttcagcgcttcacgcagttccggatgcgcatggcccagcgcgttcaccgcaatgccacccgcgaagtcgatatactctttcccctgctgatcccacaagcggctaccttcgccacgtaccggtataaagggtgccggagcgtaaacaggtatcatccattcatcaaagttttcacgcgtaattggctgagacatagcgacctctacagtaaataattcgttatttatatgttaataataagtaatgtttgcgctgtaaatgtagattgcagggttcgtgccagccagtgataaaagtgcataaacggcggaggctaactggaaatcaaggagttataaccaaaccatatgcatttaaagtgcatataaagtgaatacgtttgcgatgtgggtgaataaaaagaataaaaaacgcaatgttatgcagaagtaaaatataattctggaattgtgatcattgacgaaatttactggaaattactgcgccattctgacgcagcgcgcaccaaaagcgggcatttttttgcgccatcgttgacatcattaacaaccatcgatcaaatcacttaacaacaggcggtaagcaacgcgaaattctgctaccatccacgcactctttatctgaataaatggcagcgactatgaaatttgtctcttttaatatcaacggcctgcgcgccagacctcaccagcttgaagccatcgtcgaaaagcaccaaccggatgtgattggcctgcaggagacaaaagttcatgacgatatgtttccgctcgaagaggtggcgaagctcggctacaacgtgttttatcacgggcagaaaggccattatggcgtggcgctgctgaccaaagagacgccgattgccgtgcgtcgcggctttcccggtgacgacgaagaggcgcagcggcggattattatggcggaaatccccagtctgctgggtaatgtcaccgtgatcaacggttacttcccgcagggtgaaagccgcgaccatccgataaaattcccggcaaaagcgcagttttatcagaatctgcaaaactacctggaaaccgaactcaaacgtgataatccggtactgattatgggcgatatgaatatcagccctacagatctggatatcggcattggcgaagaaaaccgtaagcgctggctgcgtaccggtaaatgctctttcctgccggaagagcgcgaatggatggacaggctgatgagctgggggttggtcgataccttccgccatgcgaatccgcaaacagcagatcgtttcagttggtttgattaccgcagtaaaggttttgacgataaccgtggtctgcgcatcgacctgctgctcgccagccaaccgctggcagaatgttgcgtagaaaccggcatcgactatgaaatccgcagcatggaaaaaccgtccgatcacgcccccgtctgggcgaccttccgccgctaatttagcagctctcctggctcaaactgggtcaggagaattaaccttgagaaaaatcaacaaactgtcagtaatgatttgttgcctgccgtcctttgttataccgtctctgcgtttttagttgtctgaccacttctctattatcaagtttgatataggaaactccacgatgaacgctgagcgtaaatttctttttgcctgtcttatttttgcgctggtcatttacgctatccacgctttcggtttattcgatctgctcaccgatttaccccacttacagacactcatccgccagagcggatttttcggctatagcctctatattctgttattcatcattgccaccctcttgctgttaccaggaagcatactggtgatcgcgggaggaatagtttttggcccgctcttagggacactactcagtttaattgccgccacgctggcctccagctgcagtttcctgctggcgcgctggctgggacgtgatttactgctgaaatacgttggccatagcaataccttccaggccattgaaaaaggcattgcgcgtaacggtattgattttcttattctgacccgcttaatcccgttgtttccttacaatattcaaaattacgcttacggattaaccacaatcgccttctggccttatacccttattagcgcactcacgaccctacccggtattgttatttataccgtgatggcaagcgatctcgccaatgaaggcattacgctgcgctttattttacaactctgtctggcgggcctggcgctgtttattctcgtccagctcgcaaaactctacgcccgacacaaacatgtggatctgtctgctagccgccgcagcccacttactcacccaaaaaatgaaggataaaacgatgttgcaacattatagtgtgagttggaaaaaaggactggctgcactctgtttactggctgttgctgggcttagcggctgcgatcaacaagagaatgcggcggcaaaagtggaatacgacggacttagcaacagccaaccgctgcgtgtcgatgccaataaccatacggtaaccatgctggtgcaaattaatggtcgtttcctcaccgacgacactcgtcacggtattgtgtttaaagatggctccaacggacataaaagcctgtttatgggttatgcgaccccgaaagcattttatgaagccctgaaagaggcaggtggtacgccgggcgaaaacatgacgatggataataaagaaacgactcatgtcacaggcagcaaactggatattagcgtcaactggcaaggggcggcaaaagcgtattccttcgatgaagtgattgttgacagtaatggcaagaaactggacatgcgctttggcggtaatttaacggcagcagaagagaagaaaacgggttgcctggtgtgtctggatagctgcccggtcggcatcgtcagcaatgcaacatacacttatggtgcggttgaaaaacgtggtgaagttaaattcaaaggcaatgccagtgttctcccggcggataacacgctggcaacggttacctttaaaatcgccgaataaagccaggataaaggatgatgatgatgcaaagccgaaaaatctggtactaccgtataaccctcatcatcctgttgttcgctatgctgctggcatgggcgctgcttcccggcgtccatgagtttatcaatcgcagcgttgcggcgtttgccgccgtggaccaacagggtatagaacgctttattcagtcttacggcgcactggcggcagttgtcagcttcttgttgatgattttgcaggccattgctgcaccgctacctgcgtttttgatcacctttgccaatgcgagcctgtttggcgcgttctggggcggcttgctgagctggaccagtagcatggccggcgcggcgctgtgcttttttatcgccagagtgatgggccgcgaagtggtggaaaaattaaccggcaaaaccgtgcttgacagtatggacggctttttcactcgctacggcaaacacaccattctggtctgtcggttattgccttttgtccctttcgatccaatcagctatgctgccggtttgactagtatacgttttcgcagcttttttatcgccaccgggcttggtcagttaccggcaactattgtttattcctgggcgggcagcatgttaacaggcggtactttctggtttgtcaccggactgtttattctgtttgccctgaccgtggtgatttttatggcgaagaaaatatggcttgaacgccagaagaggaatgcctgatgggtttaccgccgcttagcaaaattcctttaattttacgtccacaggcgtggctgcatcgtcgccattacggcgaggtgctaagccccattcgctggtgggggcggatcccgtttatcttttatctggtgagcatgtttgttggctggctggagcgcaaacgcagtccgctcgatccggtagtacgaagccttgtcagcgcgcgcattgcgcaaatgtgcctgtgtgagttttgtgtggatatcaccagtatgaaagtcgccgagcgcaccggcagcagcgataaactgctggcagtggctgactggcggcaaagcccgctctttagcgatgaagaacggctggcgctggagtacgccgaagccgcaagcgtaacgccgccaacggtcgatgatgccctgcgtacccgactggctgcgcattttgacgctcaggcgctcaccgaactgacggcattgatcggcctgcaaaatctgagtgcccgttttaattctgccatggacattcccgctcaggggctgtgccgtattcctgaaaaacgttcttaaggagagatgatgcgccattgtgggtggttgctgggattgttaagcctgttttctctggcaacacatgccagtgactggcaagaaattaaaaatgaggccaaagggcaaaccgtctggtttaacgcctggggcggcgataccgcaattaaccgctatctcgactgggtgagcggcgagatgaaaacccattacgctataaacctgaagattgtccgtctggcggatgccgcagacgcggtgaagcgcattcagaccgaagccgcagccggacgtaaaacgggcggcagcgtggatctgctctgggtgaacggcgaaaacttccgcaccttaaaagaggccaatttattacaaacgggctgggcggagactctgcccaactggcgctatgtcgacacacagctgccggtgcgggaagatttttctgtgccgacacaaggtgcggaaagcccctggggcggcgcacaactgacgtttatcgcccgccgcgatgttacgccacagccaccacaaacgccgcaagccttactggagtttgctaaagccaatcccggcacggttacctatccgcgcccaccggactttaccggcacggcgtttcttgaacagttgctgattatgctgacgcccgatcccgccgcattaaaagaagcgccggacgatgcgactttcgcccgtgtcactgctcccttgtggcaatatcttgatgtgctgcatccgtatttgtggcgcgaaggaaaggatttcccgcctagtcccgcgcggatggatgctctgctgaaagccggcacattgcgcctgagcctgacctttaaccccgcgcatgcgcagcaaaaaatcgccagcggcgatttgcctgcaagcagttacagttttggctttcgcgaggggatgattggcaacgtgcatttcgtcaccattcctgccaacgcgaatgccagtgctgcggcgaaggtagttgccaatttcctgctcagtcccgatgcgcaactgcgtaaagcagatcccgctgtctggggcgatccttctgttctcgatccgcaaaaactgcctgacgggcagcgcgaaagtttgcaaagtagaatgccgcaggatctgccgccggtactggctgaaccgcacgcaggttgggtaaatgcgctggaacaagaatggctacaccgttacggtacgcattaatctttttgctgtgggcgatggtggcggtgatttatgcaccgctgatcccggcagctctcacgctgataagccctgctttgagcttgacacactggcaggcgttatttgccgatccacagttaccgcaggcattactggcaacgctggtgagcacaaccatcgcggcggtcggggcattgttgattgccctgctggtgattgtggcgctgtggcctgggccgaaatggcagcgtatgtgcgcccgtctgccgtggctgctcgccattccccatgtggcttttgccaccagcgcccttctgctctttgctgacggagggctgctttatgactatttcccgtatttcactccgccaatggaccgatttggcatcggtctgggcctcacccttgcagtgaaagaaagcgcatttctgctgtggatcttagcagcagtattgagcgaaaaatggctgttgcagcaggtcattgtgctggatagcctgggctacagccgctggcaatgcctgaactggctgctgttgccctccgtcgcgcctgcgctggcaatggcgatgctggcgattgttgcctggagcctgagcgtcgtggatgtggcaattattctcgggccaggtaatcccccgacgctggcggtaattagctggcagtggttaacccagggcgacattgaccaacaaacaaaaggcgcgcttgccagcctgctgttgatgctgttactcgccgcctacgttttgctgagctatctgctatggcgcagctggcggcgcactattccccgcgtagatggcgttcgcaagcctgccacgcctttattgccgggcaatacgctggcgatttttttacccttaaccggtgtgctgtgtgtggttctgctggcgatcctcgcggatcagagcacgatcaatagtgaagcgctcatcaacagcctgacaatggggctggtggcgacattcatcgctttgctcctgttactgctgtggctggaatgggggccacagcgtcgccagttgtggctatggttgcccattttattacctgctctgccactggtggcgggccagtacacgctggcgctatggctgaaactggatggaagctggacggcggtggtctgggggcatctgctgtgggtgatgccgtggatgctgtttatcctgcaacccgcctggcagcgcattgatagtcggttaattttgattgcgcaaacactgggctggagccgggccaaaatcttcttttacgtgaaatgcccactcatgttgcgccctgtgctgattgccttcgcggtgggatttgcagtcggtattgcgcagtatatgccaacgctgtggctgggcgcggggcgttttccgacgctcaccactgaggcggtggcattaagcagcggcggcagcaacggtattctcgccgcccaggctttatggcaactgctattaccgcttattatttttgccctgaccgcgttagtcgcaaaatgggtaggttatgtcagacaaggactccgctaatgctctgcgtgaaaaatgttagcctacgtttaccagaaagccgcttgctgacaaacgttaactttacggtggataaaggtgacattgtcacgttaatggggccgtctggctgtggaaaatccactctgtttagttggatgattggtgcactggccgaacagttttcttgtacaggtgagctatggctcaatgagcaacggattgacatcctacccaccgcacagcgtcagattggcattctttttcaggatgcactgttatttgaccagttcagtgtcgggcaaaatttactgctggcgctaccggcgacacttaaagggaatgcccgacgtaatgccgtgaatgatgcacttgagcgtagtggccttgagggagctttccatcaggatcctgccactttgtctggcggtcagcgagcgcgcgttgctctactacgcgcccttctcgcccaaccaaaagcgttactcctggatgagccattcagccgtcttgatgtggctctgcgcgataattttcgccagtgggtgttcagcgaagttcgcgccctggcgatccccgtcgttcaggtaacgcacgatctccaggatgttcctgctgatagttctgttctggatatggcgcagtggagtgaaaattacaacaaactgcgataacgcaaagtttttctcaatgcgtcagttcagaatggcgcactcaaaactacaatgtcgggattttcgatgaaacgtgtttctcaaatgaccgcgctggcaatggctttagggctggcttgcgcttctagctgggccgctgaactggcgaagcctcttacacttgaccagcttcaacaacaaaatggcaaagcgatagatactcgccccagcgcgttttataacggctggccacaaaccttaaatggcccttctggtcatgaacttgccgccttaaacctctctgccagctggcttgacaaaatgagcaccgaacagctcaacgcgtggatcaagcaacataacctgaaaaccgatgctccggtggcgctgtacggtaatgacaaagatgtcgacgccgtcaaaacgcgactgcaaaaagcaggtttaacgcatatctccatcctgagtgacgcgctaagcgaaccttcccgtctgcaaaaactgccgcattttgagcagctggtttatccgcaatggctgcacgacctgcaacaaggtaaagaggttacggcgaaacctgccggtgactggaaagtcattgaagcggcctggggcgctcctaagctttaccttatcagccatattcccggcgctgactacatcgataccaacgaagtggaaagtgaaccgctgtggaacaaagtttctgatgaacaactaaaagcgatgctggcaaaacacggcattcgccatgacaccacggtcattctgtatgggcgtgacgtatacgctgcagcgcgtgtggcgcagattatgctttatgctggtgtgaaagatgtgcgcctgctggatggcggctggcaaacctggtccgacgcgggactgcctgttgagcgcggaacgccaccgaaagtgaaagcggaaccggatttcggcgtgaagatcccggcacaaccgcagttgatgctcgatatggaacaggcccgtggactgctgcatcgccaggatgcaagcctggtgagcattcgtagctggccagaatttatcggtacgaccagcggttacagctatattaaaccaaaaggtgaaatagccggcgcacgttggggacacgctggtagcgacagcacgcatatggaagattttcataacccggatggcaccatgcgcagcgccgatgatattaccgctatgtggaaagcgtggaatatcaaaccagagcagcaagttagtttctactgcggcaccggctggcgcgcgtccgaaacctttatgtacgcacgcgccatgggttggaagaatgtttccgtgtatgacggcggctggtacgaatggagcagcgatccaaaaaatccggtagcaaccggtgaacgcggcccggacagtagcaaataacattgcaattactgacgctggaggctcttcagcgtcagatacccactccacacccgcgtaaaggtcgtcatccagcacaacgcaccgaagatccacgcaaaccacgcaaaccatgcagggaataaacatcccagcacaaacagtaagatcgtttctgtgccttcggttaatccccccagatagtaaaagctcttatgtgcataaccggggttatcaatctgatgttttgctgccagtgcagcaaaggcgagaaaactgctgcccgtgccgataaacgcaaacaacaaccagccgcctgccagcgcattttgctccggtgcagcaagaataaagccaaacggcaccagcgcgtaaaagagaaaatcgagagaaatatcaagaaagccgcccgcgtcggtaagctctctgcgccgcgccagcgcaccgtccagaccatcaagcagcctgttcaacaaaatgacgactagcgccgccagataccagcccagcgccagaaacggcagagccagcacgccgatggcaaatcccactaatgttaaaccatctggcgtaatgcccggtttatcaagaacccgcacgcactgatgcaacaacggtttaatccggggatgaagatggcggtctagcacaggcactccttaaatataaagcctttctgattgagcaacagtgcggatattatggcatttttcgcttatctgcccgtgtgtaatttatgaaaatgattgaagttgttgccgccatcattgaacgtgatggcaaaattttactcgcgcaacgccccgcccagagcgatcaggcgggattatgggagtttgccggtggtaaagtcgagccggatgaaagtcagcggcaggcgctggtgcgtgagttacgcgaagaactgggcatcgaagcaactgtgggtgaatatgttgccagccatcagcgagaagttagcgggcggattatccatcttcatgcctggcacgtacccgacttccacgggacgttacaggcacatgaacatcaggcgctggtctggtgcagtcctgaagaggcgctgcaatatccgctggcccctgctgacattccattattagaggcgtttatggctttacgcgccgccagaccagcggattaattatggctttacgcgccgccagaccagcggattagtgctaagggttttgtcatcacgctggcattgcagcagtattccttcggctttaattaccgccccttcagaataattttgatcctgataaacgcagcactgagtacagggctgcgcactctgcccgccactactgaacacttctggcggtacgtttacctccacgtccggacgataatgcgggttagccagtgcaattaatggaaatgctaatactacggcgaacaatgctcgactcacagggaactccttaacgttattgtctctgctactgataacggtagccgggtggcaaaactttagcgtctgagttatcgcatttggttatgagattactctcgttattaatttgctttcctgggtcatttttttcttgcttaccgtcacattcttgatggtatagtcgaaaactgcaaaagcacatgacataaacaacataagcacaatcgtattaatatataagggttttatatctatggatcagacatattctctggagagtttcctcaaccatgtccaaaagcgcgacccgaatcaaaccgagttcgcgcaagccgttcgtgaagtaatgaccacactctggccttttcttgaacaaaatccaaaatatcgccagatgagtttactggagcgtctggttgaaccggagcgcgtgatccagtttcgcgtggtatgggttgatgatcgcaaccagatacaggtcaaccgtgcatggcgtgtgcagttcagctctgccatcggcccgtacaaaggcggtatgcgcttccatccgagtgttaacctttccattctcaaattcctcggctttgaacaaaccttcaaaaatgccctgactactctgccgatgggcggtggtaaaggcggcagcgatttcgatccgaaaggaaaaagcgaaggtgaagtgatgcgtttttgccaggcgctgatgactgaactgtatcgccacctgggcgcggataccgacgttccggcaggtgatatcggggttggtggtcgtgaagtcggctttatggcggggatgatgaaaaagctctccaacaataccgcctgcgtcttcaccggtaagggccttagttttggcggcagtcttattcgcccggaagctaccggctacggtctggtttatttcacagaagcaatgctaaaacgccacggtatgggttttgaagggatgcgcgtttccgtttctggctccggcaacgtcgcccagtacgctatcgaaaaagcgatggaatttggtgctcgtgtgatcactgcgagtgactccagcggcactgtagttgatgaaagcggattcacgaaagagaaactggcacgtcttatcgaaatcaaagccagccgcgatggtcgagtggcagattacgccaaagaatttggtctggtctatctcgaaggccaacagccgtggtctctaccggttgatatcgccctgccttgcgccacccagaatgaactggatgttgacgccgcgcatcagcttatcgctaatggcgttaaagccgtcgccgaaggggcaaatatgccgaccaccatcgaagcgactgaactgttccagcaggcaggcgtactatttgcaccgggtaaagcggctaatgctggtggcgtcgctacaagcggcctggaaatggcacaaaacgctgcgcgcctgggctggaaagccgagaaagttgacgcacgtttgcatcacatcatgctggatatccaccatgcctgtgttgagcatggtggtgaaggtgagcaaaccaactacgtgcagggcgcgaacattgccggttttgtgaaggttgccgatgcgatgctggcgcagggtgtgatttaagttgtaaatgcctgatggcgctacgcttatcaggcctacaaatgggcacaattcattgcagttacgctctaatgtaggccgggcaagcgcagcgcccccggcaaaatttcaggcgtttaactgtatttaacggaacttgctccccacggaacatttcttatgggccaacggcatttcttactgtagtgctcccaaaactgcttgtcgtaacgataacacgcttcaagttcagcatccgttaactttctgcgatagcagcagatatgccagtaaagaaatcccatttgactatttttttgataatcttcttcgctttcgaacaactcgtgcgcctttcgagaagcaagcattatataatgccaggccagttcttcttcaattgtcccgttttgaaaagctgtgctacttatgctgatcatccaacttaattccgccgcccatattagcttcgcgctggatttaccggagctatgattagcgcaatcagagatatagtcactgggaaaaacagcaaatttattcaacaaggcgataacctgctctggggcttcctccatgtttgctttaaaggtattggctccatggtcgccagaaagaaaatgctccattaaggcacaataactttcgctatcttcgataccccattgatcctctaaagactcgcgtcttttacttatgatatcgatgctgtcaaaaggaagcacatgatattggaaggtatctttgccaggttcaggctttcgcggccagaactccagcgtttcagaccattgcttatgatagaatcgataaggtgcgatcaattgtagcgcctgtaacttctcgatactgagcggctcaatacctttagcctgataataatgcagttgttctttttttgctttaaaaccggcccgaacaataagccccatcataattaatagataaagaaaagagcatcccgcggtaatcaggcctctttcattcaaaccgttggatgttatcgctgcgaacacaaacattacagcgacaacacatgttaaataaaacccccacttacaaagcagcatggccttattttctttaatcatccgttcaaaattactattaaatatttcccagccattaaaagaatacttctcgctcccaggatggttttgtaataaaacttttttcatcacattccctgttattacatactttagaggcgataattttatccatgcaaaaaaaatatccaacgaattttcttgatccgctggatatttcagaatatgactcgaatagcacgaaagattcactcgcttacgctatcgccccgcttccgacttcatctgctggcggactttttttcgcactacgtttacgcggtgcagcctttttcttatcagcactgccaccactgcccggagccacaatgccgcgaaactgccgcaccggcgtacgtttggcttgatcaataagctgatatagcgtccccaccagcggctgcataaagtcctgatagcgacactgcttttcgctgatttgcgtcagcacgctttcccagtgcgcggtcatgtccggtcgcgtcgccatctccggcaggctatggaatagcgcttttccggcgtcggtggagtggatatagcgcccttttttggtcaggaaaccacgcttgaacaacagttcaataatcccggcacgcgttgcctctgtccccagaccatcggtcgcacggaggatctttttcagatctttatcctgcacaaagcgcgcgatcccggtcatcgcgctaagcagtgttgcatcggtaaaatggcgcggcggctgggtttgccgctctaccacttcacctttttcacacagcaactcatcgcctttcgccaccacaggcagtggcgtgccgtcgttttcttcatcgcgctctttgctgcctaacagcgtgcgccagcctgcttcagcaagaaaacgcgctttagcgacaaatttgcctttggcaatgtccagttcgataacacacttgcggaacaccgcatccgggcagaattgcatcagatactgacgggcaatcaggttatagaccttcgcttcgttctccgtcaggttgatcgcagaactccgtgcggtcggaatgatggcgtggtgcgcatcgacctttttgtcatcccaacagcggttgcgtatatctggatctaccactggctgcggcaacagatccggtgcatgaacactgatggcattcatcaccgcgtggcgtccggcaaaatgttcttctggcaaatagcgacaatcagaacgcggataagtgattagcttgtgcgtttcgtacagtttctggcagatatcaagcacgttctgcgcactcagaccaaaacgttttgccgcttcaatctgcaacgcactaaggctaaaaggcagcggcgcggattcactttcccgtttatcgttatagctggtgacaatagccggttgaccactaatgcggttaaccacatgctccgccagtggacgatgtaacaagcgcccttcttcatcctggtacggttcacacgcttcgctcggttgccagatagcggtaaaccgctcatcggcaggtgtcacgatatgtgctttgacttcaaagaagtctttcgccacgaagttttcaatctcttcatcgcggcgcaccaccagcccaagcacgggcgtctgcacgcgtcccacggaaagtacgccctgataaccggcattgcgaccgagaatggtatacgcacgggtcatattgatgccgtacagccagtcggcacgcgctcgcgccagcgcagaaacgcacagcggtacaaactcactgttggaacgaagacggtcgatcgcccgctcaaccgcctgcgggttcaggtcgtttatcaagcaacgctgtacctgctggcgcttttccggtgccagttgcagatagtccagcacttcatccaccagcaattgcccttcacgatccgggtccccggcgtgaacgatttcgctggcttcatgcaggaaccgtttgatgacgttaagttgtttggtcacggagggtcggggctgtaattgccacttttccgggacaatcggcaaatccgcaagattccagcgcgcatagcggctgtcgtaggcgtctggctgcgcctgctcaagcaggtgaccgatacaccaggtcaccacctgaccattaccgcactcgataaagccatcgcctttccggtgcggtttgggcaggacatcagcaatggcgcgcgccagactcggtttttcggcaataaacaaccgcattgaattaacgaatctcaaccatggcacgaccgccgcgcgctggcaccagttcgccaattgccgtcagttcaatgccaaactcggcggctgtagctttgacctcattttctgcttccggcatgaccgccagcagcaaaccgccagaagtttgcggatcacacagcagatcgcgcacttcacgcggcatttcacccatcagatgaccgtagctggcaaagttacgttcagtgccgccaggtactgcgcccaacttaatgtactcttcaacaccggggagtttcgggatcgcttcatagtcgacgcgtgcctgcacaccagccccctgacacatttcgctcaagtggcccagcagaccaaagcccgtaacgtcggtcatcgcttttacgccttcgatgttggcaaaggacgcgcctgcgatgttcatccggcacatcacttccgtcgccagtccctgatgttctggtttcaacagactttttttctcagccgtggtaagaacgccgatccccagcggtttcgtcaggaacagtttgcatccggcttgtgcggtactgtttttcttcacccgctcggtcggtacgatccccgttaccgccagaccaaaaatcggctccggcgcatcgatggagtgaccgccagccagcgcaatacccgcctgacgacatgcatagcgtccaccttcggtcacttcgcgggcaatttctggggaaagtttgttaatcggccagccgaggatcgcaatcgccataatcggtttgccccccatcgcgaagatatcgctgatggcgttagtcgccgcaatgcggccaaaatcgaaaggattatcaacgatcggcataaagaagtcggtggtactgataacgctggtgccattgcccagatcgtacaccgccgcatcgtcgcgggtttcattacccacaagcaaattcggatcaacaaacttcgcctgctcactatgcaggatggtttccaacacttttggggaaattttacagccgcaaccagctccgtggctgtattgggtcaaacgaatgctgttctcgctcatggacatctcctgtcaatgcaatccgggtatggtaaccctcattccgtgaagtgataagtgagagtgtctgaattcctgcgcctttgctcacaatccagacagtttcgcgacaattatcagaaataagttacaaacggcgtcgggtccgggacgttaatgctcgtagatgctttcagctgcggcgtaccgaggtagagaaaaccgacaattttatcctgctcacggcaaccgaatgcttcacgcactaccggactttcagttaatgcgccactgcgccagatgccgccaaacccctgggcaactgctgccatttgcatcgccatgaccgcgcatccggcagacatttcctgttcccagcgcgggactttatgattctcttcgcatttcgccaccaccgtgatgatgagcggtgcgcggaacggcgcattacgggctttgtcgatagctttgtcatcactaccggcagcaatcgccccctgttccagtacggcgctgaaacgctcgcgcccttccccttcaatcacaaaaaaatgccacggttgcatggacttatggtccggcgcacgcatacccgcacgcaggatgttttgcagttgttcacccgttggcgcgggttcagccaagcgggaggcgctacggcgattgatcaatagttcgagtgcatccatttgattaactcctgtcgtgatatttattcacaaaattaacacgagagtggattttgttacagcacagtccgcaattcctgctgacaagtaccggttgggtcattacgataaccacatctattgcgcctgtgacaggtgtgaccttaagttgggagaatacatgcgaaccctttggcgatttattgccggattttttaaatggacgtggcgtctgctgaatttcgtccgtgaaatggtacttaacctgttctttattttcctcgtactggttggtgtggggatttggatgcaggtcagtggtggtgatagcaaagaaacggccagtcgtggcgcactgctgctggacatttctggtgtgatcgtcgataaacccgacagttctcagcggtttagtaaattaagccgccagctgcttggtgccagttccgatcgtctgcaggaaaacagtctgtttgatatcgtcaacactattcgccaggcgaaggacgaccgcaatatcaccggtattgtgatggatctgaaaaacttcgcaggcggcgaccaaccgtctatgcagtacatcggcaaagctctgaaagagtttcgtgacagcgggaaaccggtttatgccgttggcgagaactacagccaggggcaatattatctcgccagtttcgccaataaaatttggctgtctccgcaaggcgtggttgatctgcacggctttgccaccaacggtctgtactacaaaagcttgctggataagctgaaagtttccacccatgtgttccgcgtgggtacgtataaatctgccgttgaaccgtttattcgtgatgatatgagtccggcagcccgcgaagctgacagccgctggattggtgagctgtggcaaaactatctgaatactgttgccgctaaccggcagatccctgctgagcaggtattccctggcgcgcaagggttgcttgagggtttaaccaaaaccggtggcgataccgcgaaatatgcactggaaaacaagctggtcgatgcactggcaagcagtgcggaaatcgaaaaagcactgaccaaagaattcggctggagtaagactgataaaaattatcgcgccatcagttattacgattacgcattgaaaacgccggcagataccggtgacagcatcggtgtcgtctttgctaatggcgcaattatggatggcgaggaaactcaggggaatgttggcggtgataccactgcggcacaaatccgcgacgctcgccttgacccgaaagtgaaagcgattgtcctgcgtgttaatagcccaggcggcagcgttaccgcgtctgaagtgattcgcgctgaactggcagcagcccgggcagcgggtaagcctgtggttgtaagcatgggcggcatggcggcatctggtggttactggatttccacgccagctaattacattgtggctaaccccagcaccctgaccggttctatcggtatcttcggcgtgatcaccaccgtagaaaatagtctggatagcattggtgttcatactgatggtgtcagtactagtccgctggcggatgtttctatcaccagggcactgccgccggaagcgcagctgatgatgcagttaagcattgagaatggctataaacgctttatcacgctggttgctgatgcgcgtcatagcacgccggagcagattgataaaattgcccagggccacgtctggaccggtcaggatgcaaaagctaacgggctggtcgatagtctcggggatttcgatgatgcggtcgccaaagcagcagagctggcaaaagtgaaacagtggcatctggaatattacgttgatgaaccgaccttcttcgacaaagtgatggacaacatgtctggttctgtccgggcaatgttgccagatgcgttccaggccatgttacctgcaccgctggccagcgtagcctctaccgttaaaagtgaaagtgacaagctggccgcgtttaatgacccacaaaaccgttatgcgttttgcctgacctgcgccaacatgcgttaagtcttgtactgagtggccgacagatcgtcggccacattattttttacgtcgacgaatcctcttcccgctgtttcgccccatatttccttatccgcatagtatcaggtgcgctccccctgcctcacgtatatacttttgctctttcgatatcattcatatcaatatcatgcaaaagaaaagtatttacgttgcctacacgggcgggaccatcgggatgcagcgttccgagcagggttatataccggtgagtggtcatctacaacgccaactggcgctgatgccggaattccatcgcccggagatgccagatttcaccattcatgaatatacgccgctgatggattctagtgatatgacgccggaagactggcagcatattgctgaagatattaaagcgcactatgacgactatgatggttttgtcattctgcacggcaccgacacgatggcgtataccgcctctgcgctgagcttcatgctcgagaatctcggtaaaccggtcattgtgacagggagtcaaatcccgctggctgagttacgctctgacggacaaattaatctgctgaatgcgttgtacgttgcggcgaattatccgatcaacgaagtaacgctctttttcaataaccgattgtatcgcggcaaccgcactaccaaagcccatgccgatggttttgatgcgtttgcctctccaaaccttcctccgttactggaagcaggtatccatattcgtcgtttgaatacgccacccgccccgcacggtgaaggggaattaatcgttcatccaatcaccccacaaccaattggcgtagtgacgatttatccagggatttctgctgacgtcgtgcgcaattttctgcgccaaccggtgaaagcattgattctgcgctcctatggcgtgggtaatgcgccacaaaacaaagccttcctgcaggaattacaagaagccagcgatcgcggtattgtggtggtcaacctgacacaatgtatgtccggtaaagtgaacatgggtggttatgccaccggtaacgccctcgcccatgccggcgtaattggcggtgcagatatgactgtagaagccacgctaaccaaactgcattacctgcttagccaggaactggatactgaaaccattcgcaaggccatgagccaaaacctgcgcggcgaactgacgccggatgattaaggagactgtaatgccccctcgcgccctgttactggtcgatttacaaaatgatttctgtgctggtggcgcgctcgccgtgccggaaggtgacagtacggtggatgtcgctaaccgcctgattgactggtgccagagccgcggtgaagcggttatcgccagtcaggactggcacccggcgaatcacggcagttttgccagtcagcacggtgtagagccttatacgccaggccaactcgacggtttgccacaaaccttctggccagatcactgtgtgcagaacagtgaaggcgcacaattacatccgttactgcaccaaaaagcgatcgcagcggtgttccataaaggcgaaaatcctttagttgacagttacagtgccttttttgataacggccgtcggcagaaaacctctctcgatgactggttacgcgatcatgaaatcgatgaattgatcgttatgggcctggctactgactattgcgtgaagtttaccgtgctggacgcgttacagttaggttataaggtaaacgtgattaccgatggttgtcgtggcgtgaatatccagccccaggacagtgcgcacgcgtttatggagatgagtgcagctggggcaacgctatatacgctggcagactgggaagagacacaggggtaattttacgctggcctacaattctgtactggcattgtaggccaaataaaacacgtcagtggcacatctggcaattgatgccatcaacgaaagatttaattcacctcagaaatctcttccaagctcaccttccgcgtttcgatgccaaaaatggagagaaccagcgcacagagcaataacataacaccaagtaccataaacaccgtgatgctcccataatgtgttaataatgccgcaacgccatagggcgtgaagactgcgacgatccgtccgacggcattaacgaaaccgctaccgcgcaggcgtaaatgcgttggccaaagctccgggatataaaccgcgctcgcgaagcaaacatacatgtataaaaagaagatcatcaccagtccatagattaaaatcgcccactctgtagtctgaatactatagatatagcctaacacggcaataataataagtaaggtggagccaaataaccgacgaggaaaatgatcaataattaatgccgcaataaatattcctaccggagcgccaatcataataacagcggtcattaatatacttttatcgacatcaatgccggagttaacaaatatggtcggtatccatacggtgatggtataaaggctaatgttcattgcaattaaaacagtaatcgcgactaatgtacgtcgtaacatttcacctttaaacaggagccagaaagtacccttgattactttaaccttgctgttgctctgatagctagtaagcgggggtaaacgaatactcttctctctttcaatttgctgctctacttcacgaagttggcattctgcacctgcgatttgccctttccctgccagccatcgtgggctctcgataaagtatttaccactgagaaaccaggctaacagtatgccaataccacccagcagaaacattattcgccaactaaaaaaagcgataaccaccacgcctatcgccgcagacagcatggggctccagttaccaacaaaactgagccgcgcggaccattttccacgcaccgtcgcggggataaactccgtaaaactggcatagccaaccataatcagcgcccccattcctgttcccatcaggaagcgaaagaagatgagccagtacatatcagggacaaaagcggcccctgttgcagcaataccgacgatgagaagatttatgcgaaacgccctgcgccgcccaaagtagtcaccaataaacccaccagtaagactgccgatgaaataaccaaacattaatgcgctggtaaaggcggcattgaggaaattattactccatccattgcttaccagctttgctaagacgacattaccggagtaactcaaaaaccctgttaataacagactaaagcttataataccaaatatacgataatgaaaccgggccaaaggcaagcggtccagtcttgcgccaatttgatcatattgttccattaggtgcctcggatttgctaaaaaggtagcaattgcggcaaattcacttgccgcatctttatcatcattttatttcaaggcgcaggaacaaataatattgacaacgtgtgcttaaattaccacaccagctggatattattgtctttgcaaaatgctatccactctgcacccggacttttatcagttattatgtaattaatatgactaaaatcagctaactggacaaaagctttgcgatcaaacttagagtgatcaaccaataacgcaacttctgtcgcctgacggatcattgtctttttgatttcagcttccgcttcattagagtccagcgcgccgctgttaatatcaagacctttacaactcattaccatgatatcgacatgatagcgcctgatgatctctttagtaattcttccttgcagactaagtgtatttttgtttagttccccacccgtactaacgactttaatttcactctgagccagaacatgaatcgcttccgcgctgttggttagcaacgtcaggccactacggtcctgtaacaatttgagcaattccattacggtactactggaatcggctgccatggtggttttattgtcgataaagggtagtgccttgcgtgcaataagctgcttctcttcataaaagctactagcgcgcttataaaaatggatattctccgtcaacatcgctgtatttaaaacagcaccaccataggttctggtcaaaaagccttcatcttccagcttctcaagatcgcggcgaatggtttcttcggttacctgaaaaatcccactcaaattactgactgtcacctttttatcgttggcaaccatttgcttaattgcctgaatcctgtcttttgccgccacgattacacccctgtatctttttacatcacattagcgcgattatcgcataaccgatgtttactttcaaaataacctgtttgaatcacagattttcatcacagttttcacagaaacagaggtgaatcgtgttgagtatttaacgctccagggcctctgccatttccctcatcaatgttgcgtctgcatcgcttaagttgatattcagtgccgcgacattttcgcgtacctgttccggtgcagtagccccactaagaatggagattaaatcactctgttttaatatccacgccagtgccagagtgggaattgtgcactgataacgagcacaaagtggctgccactgttcaagcatatcaatcactttcagcatgttttcacgctggaaccagactttatttgcccgagcgccgcccggaacgtaatcacgagtgatggtgccggtcaacaatccctgctctagcggggaataaacctgaaccacaatgccattatcacgacatagtggcagcagttcgttttccattgcccggtcgaggatactgtatttcgcctgaataatatccagttcaccatattgcagatactcgcggatatggtcagcatcgacgttagcagcgcctatagcgcgaattttcccttcagactttaactcattaagcactgcgacagtttcagcgatcggcgtaaaaaatggcggcacgctctgccagtgcgtcatgtagatatcgatgtaatcaatacccagacgttgcaagctcgctgctacctcttcgcggatagattccggggaaaggtttttatacaactgccgatcgccaactttgttgaataaacttccttttcgttcccagacaatgccgcatttggtttctactacaacctgttcacggggcagtttttttaacgcctgaccgacgataacttcactattgccaaagttatatcctggcgcagtatcaatcagattaatgccacaacgatgggcttcaagaatcgtatcaatacatatttgccgatcgagatcgccattccatgcaggaccgccgccaatggcccatgtccccaaccccattcggctaagcgtaatatccgttgtgcctaaaggtatctttttcatttgccttcattatccttcgtattcttccagcaattgttcgaccagctttctgttttttacgccggtggtggcaccgacgcttagaacgctgatagccgccgttgcattggcaaagcgtgcgcattcacgcagatttttgccttctaacagtgccgcaataaaaccactagcaaagttatcgcccgcgccaatggtgtcgatggcggttattcctgcgaccgccggcaccttcatcgtcatgtcaccacgcttgataaagcagccgtctttacccgttttaatcaccaccgtttttacgccgcacgcaagaaagcagtcagcaatttcatccagtgtctctttcccggtgagtaattttgcctcggcaaaattaggaaacagataatcgacataactcaatgcttcgcaaatatcatccagcgtttcattcaaccgcggtttgatcatatcggcacagataatcatctgccgggctttagcttgcgtaaaaatttctgttagcgctttaccatccaatagtggactgttgaaaatactggccagacttaataatttcgcctgagaaaaccgcgcaaaatcaacatcgtcaatattcaatttccacagactgccattacggtttgtgacaaacgtccgctcgccatcctccgtcaccagtccaacgttaatagaggtatctatgctgacgtcctgcttcaggctttgaatatcaatattctctttgcggcaatggtcgagaataaattgccctgcggcatctttaccaatacgactcattaatgctgtgcgatggcccagacgagaaataattgttgcttcatttattgcatcacccccggtggtcattgcgattctttcaagaggataagaatccacatcaaagatatttttactgaccggttgcaatggaatatcaacaatagcggcacctatacaaataacgtcgagattatccatatcattattccgctttgccatcagaaccgaacagtttaattttttccaatgcccgttcttttacagctttacgtacttcacgttctaaatgcaggaaaggctgatcctggttttctttcactgcaaccattgcggcctgacagagctccgtatgaatgttgattttcgcgatacccaagctaattgcagttttaatgtcggcatcactgatcccgcttgcaccgtgcaaaaccagcggaacagaaacggcatcgcgtacgcgtttgacgacctcaaagttcaattgtggctcactcgtataaaccccatgctggttgccgatggcgacagccaaactatcacagcccgtacgttcaacaaattcagccgcctggtcaggatcggtatagtgatagcccgccagcgcttcctcataaacggtttcattaccgacatgccctaattccgcctctaccggaatacccagcggatggaagaaatcgacagcctctttggttaaacgaatattttcttcgaaatcaaacgcggaagcatcacgcattaaactattcataccatgagtccaggcgttatgaataatctccatactccgaccatgatcccaatgagttattaccggcaccgttgctttttgtgccatacttaccatcatgtgagagaaatcttcaaaactggtgttaccgacaaaacctgtaccaaaagaaataataaccggggatttcgcttcttcggctgcgtcgataacgcccatcaacatttctgcattccatacgttaaaatgggcaattgcataatgtttatttgtggcatcgttttcccaatatctgatatctgcgagcatgttctgttctcccgtattaattaatcgctaattttaataacgcctttaataatgtcgcgtttgttgttaacactctcttcaaatgcctgttgtacatcccgataatcgtaaatatgcgtcaccatgcttttcacatcgaatcgcccactagaaatagcttcaatcgtgaccggataacgattggcatagcggaataccgtctggatagtgacttcgcgattgattttgaggaaattgattgcgctatcgccgggtacagtaccaacaatcataattttaccgccgcgcattaccagataaggtgcctgtttaacggtgaccgcagaacccgctgtttcgaaaacaatatctgcgcccatgtcttcggtaaattgctgacagcgtgcaatagtgtcttcttttgcgccgttaataaccactgtcgcaccaagctgttccgccattgccagacgtttttccagcacatcaacgacggcaatttccgttgctcccaggcatttgcacgcttgcaacgtcatcaaaccaatacaacctgctcccagaataattatcttcttacccggtttaacatctgccagcatcgcggcatgcatcccgactgcggcaggctccaccagcgccccttccatcgtgtccatattgtcgggcagtttgtaagtaaagctctccggatgacacagatagtgcgttaatgcgccgcggtagttgggttgtgtcgccataaaatcaacgtccgggcagatgttatatttgccttccagacagtaacgacagtgaccgcaaggaacgccaggttcgatatttacccgatcccccggtttaaatttgcgcacgcggcttcccacagccacaaccgtcccggcgcattcatgacccaggccaatttcttgatttgggtctttaggcggaataaacgggccactttcaaaaccatgtacatcactaccacaaataccgacatattctactttaatcaaaacttcatcttctttaggcactggtatttctgcactaataattttcattgtgcccggcacctgcaatattgctttactatttttcattttgaatccacccgtattatttattggctactgcatcaatacttaaactttcaacggagacacctttggtttcgattccaatggtggcgatagcaattgcgacaataatactaaccgcccccagaagaataaagactcccgtaacgccataactactgagcagcactgcaacggcataaggtgcggcaataccactgattcgccctaccgcattcgccagaccggagccacggagtttggcctctgtcggccagatttcagggacatacactgcgctggcatagcaaacgtacatatagacgaaagtaatcaggaagaaaccaatcaacgttatgagcaacatactggtttgcagactatagatatatccgagcaccgcaatcaggattaatagccccacacccattgttttacgcggaattttatccatcaccagcatggcaataaaaataccaaatggcgcgccaaacatactcatggtatttaaaacaatgctgtcttttaaattaatcccctgggtcatgaatattgttggcaaccagttaattagtgtgtactgcacaacgttcatggcaatcagcacacaagagcctaatatcacgcgtttcagtaatactcctgtcagtaaggcactatacggcaccgcttgtggcgctttaccgtcatcagcaataaccacaggcggcaaaggtttacccgtctggcgtatgacgccttcttctatactccgcatgactttctcggcttcctgataccgtccgcggctttccagccagcgcggggattcaggaaagtagcgccaggccagcgccgtagcgataaggctcaatattgcagggataagcagttgtacccgccagttccactctgcactaatcagcggcgtgagtcccatcgctatcaaactacagagcggataactccagttgccaataaaggaaacccgactactccacgttccacgatttctaccgggcatatattcggtgaaaccagcaaacagcgtaaccagtaaagctcccagcccaactcccatcacaaaacggcaggcaataaggaaatccatattcggactgaaagcaccgacaaccatgctggcaatatgaatggcctcatagaggatgaacgcatttctgcgaccggttttgtcgccaatgatgccgcccaccagcgcaccgagaaacattccggcggtcgtgattgcactgaatgtggctgtggtggaattatctgtccagcccaacgctttcagctgcgcgaggatcaagccaccaacggcattactccagcagacaagcaagccaaacgcgacgatggcaaacatactactatgccagcggcaatccggtaagcgatccagccgtgcaccacaatgcggttttgttatctgttccatgcgataacgttccttcaggagagtggttattcatcaaagtcgtaagtcatgatcactttgattgcggttttatcgaccatcgcatcaaacccttcgcgccattggctcaggccgatacgatgcgtgatcatcggtttgactttgatagcgccgctggctaatagcctgatagcgttacgccaactggtggagtcataggccatatgcccaatgatgcttttgttccaggcggtaatgtcattaatgctgaaatcaagaggtttgaagcccattccaacgcgtaccacttccccgttcgggcggagcatttcgatggcttgtttcagtgcgatattggcaccggagcattcaatcaccagtcccagattgtctttgccacaaatttgctggcagcgcgccaccacatcttcggtagaaccatttactactgccgtcgcacccagttcttttgcaaccgggaagcggaccgccacatcttcttgcagaccaacgacgacgatatttaccgcccccataattcgcgccatttgtacggagaacagcccgagtgggccagtgccgatgacgaccacatcctgaccaggaaggaatttgctttgctgcgcgatggatttgtaggcattacagatagggtcaagtacggctgcgtcctcataatcaacaccatcagggatttcccacaacgcatgacgatgaattttgagaatttcaccaggaaccagacaatatttggaaaaaccaccgccccaggtattattatccagaccaaggtttactttttctgtacaacacagaaaatcaccttgttcacaggccggacaaacaccgcaaacgtgaccgctgttatcgcttacgacgcgttgccccactttccagtctttgactttttcaccaacctgcgcaatacaacctgcgaactcatggccgcggatagagttaaactcatcagaaccgctatcgacattgtagtgcttcatgtctgcgccgcagattgccgcggctttaatttcaatcactacatcttccgggccacacatgggttgtgggacatcaatcatcttgtagccgccaaaggccttgccaaaccgagccagtgctttcattgcgtcatcctctgtgtttagttttgcttagatggccatcatacttacccacatgatttttgaggtcaacattaaatctgtaaaacacagataatgatctgcgttttacaactcagatcacaattacgcagaaaatggctgggtctgttacaggttgatggaaggcggggcgcaaaaagagcaaattcgagagggattaccggccaaataggtctgagacttaagttcaggagaagtcattcaggtgtgaacgggacggcaagagatcggactgggacttagccaggtcatggcgagataattgagatgagtcgtggggtcattgttggctatccccttcatagccgaggcaaaaaggggatgaaccacttacttaaacatggcaataggctttgcactgataccaaaatcttcttttaactgctgtttgctcttcatgaccatctgaccatttgtgtcaattgtcatatgctgtgcttcgatattatggcgggcttgccacagcatcaccagttgcaggcagttctctttttgttcctcggtcaacgcaacgccatcaggccatttccccagttcaacggcggtgctcaaacgctggtatacctcaggcatcatgctgttgataatgtcatcaagattcataatttttccgctcctgtggaataagttgctgaatcgttttttcaaccgttgatttcttcgccgttttcgccatcggtaaagcgtaaagaggcagagttaacacaataacgttcgcccgttggctgcggcccgtcggggaagacatgccccagatgggcatcacagttaccgcaacgaatttctatgcgctgcattccatgactcaagtctttgatataacgaatggattcttcacttaccggttcgtagaaactgggccagccacagccggaatcatacttggtttgggaatgaaacagcggggcatcgcagatcaaacagtgatatacgccgtcacgcttgttatgcagtaaacgacccgtaaatggcggctctgtcccatgattctgcgtcacgtaaaactgcatctcggacaaattttttttcagttcttctgcgctaggtttattagccatttgctcacatctcactttaatcgtgctcacattacgtgactgattctaacaaaacattaacaccaactggcaaaattttgtcctaaacttgatctcgacgaaatggctgcacctaaatcgtgatgaaaatcacatttttatcgtaattgccctttaaaattcggggcgccgaccccatgtggtctcaagcccaaaggaagagtgaggcgagtcagtcgcgtaatgcttaggcacaggattgatttgtcgcaatgattgacacgattccgcttgacgctgcgtaaggtttttgtaattttacaggcaaccttttattcactaacaaatagctggtggaatatatgactatcaaagtaggtatcaacggttttggccgtatcggtcgcattgttttccgtgctgctcagaaacgttctgacatcgagatcgttgcaatcaacgacctgttagacgctgattacatggcatacatgctgaaatatgactccactcacggccgtttcgacggtaccgttgaagtgaaagacggtcatctgatcgttaacggtaaaaaaatccgtgttaccgctgaacgtgatccggctaacctgaaatgggacgaagttggtgttgacgttgtcgctgaagcaactggtctgttcctgactgacgaaactgctcgtaaacacatcaccgctggtgcgaagaaagtggttatgactggtccgtctaaagacaacactccgatgttcgttaaaggcgctaacttcgacaaatatgctggccaggacatcgtttccaacgcttcctgcaccaccaactgcctggctccgctggctaaagttatcaacgataacttcggcatcatcgaaggtctgatgaccaccgttcacgctactaccgctactcagaaaaccgttgatggcccgtctcacaaagactggcgcggcggccgcggcgcttcccagaacatcatcccgtcctctaccggtgctgctaaagctgtaggtaaagtactgccagaactgaatggcaaactgactggtatggcgttccgcgttccgaccccgaacgtatctgtagttgacctgaccgttcgtctggaaaaagctgcaacttacgagcagatcaaagctgccgttaaagctgctgctgaaggcgaaatgaaaggcgttctgggctacaccgaagatgacgtagtatctaccgatttcaacggcgaagtttgcacttccgtgttcgatgctaaagctggtatcgctctgaacgacaacttcgtgaaactggtatcctggtacgacaacgaaaccggttactccaacaaagttctggacctgatcgctcacatctccaaataagttgagatgacactgtgatctaaaaagagcgacttcggtcgctcttttttttacctgataaaatgaagttaaaggactgcgtcatgattaagaaaatttttgcccttccggtcatcgaacaaatctcccctgtcctctcccgtcgtaaactggatgaactggacctcattgtggtcgatcatccccaggtaaaagcctcttttgcattacagggcgcacaccttctcagctggaaacctgcgggtgaagaagaagttctgtggttgagcaacaacacaccgttcaaaaatggcgtcgctattcgcggtggcgtaccggtttgctggccgtggtttggtccggcggcacaacaaggtctgcctgcgcacggttttgcccgcaacctgccgtggacgctgaaaagtcatcatgaagatgctgatggcgtagcgctgacttttgaattgacgcaaagcgaagagacgaaaaaattctggccgcacgactttacgctgttagcgcatttccgcgtgggtaaaacttgtgaaatcgatcttgaaagtcatggcgaatttgaaaccacctctgccctgcatacctactttaacgtgggtgatatcgctaaggtaagcgtcagtgggctgggcgatcgcttcattgataaagtgaatgacgcgaaagaaaatgtactgaccgatggtattcagaccttccctgaccgtaccgatcgcgtgtatctgaatccacaagattgcagcgtgattaatgatgaagcgctgaatcgtattatcgccgtaggccaccagcatcatctgaacgttgtcggctggaacccgggaccggcgcttagtattagcatgggcgatatgccggatgatggctacaaaacatttgtttgtgtagaaacggcttacgctagtgaaacgcaaaaagtgaccaaagagaaacctgcacatctggcgcaatccattcgcgttgcgaaacgttaatttacgttaatgttgtgtgccgggtgcaatgcatccggcacacaacatcacaccatatccagcgcagtttttccttttggtgccggatatgccttatccagcatagctaattccgcactagaaagttcgacctcaagcacagccgcattttgttggacatgggcaatcgtggccgcttttggaatcgccatcacaccctgatgactgatcacccacgccaacaatacttgtgccgcgctgatattgtgagcatgtgcaatttcgttgactaccgcgttttttaacagtccattgcgcaaccgcccggcctgggctaacggactgtaagccatcaccggcatctgctgttgctggcaccaggggagtagatcgtactcaattcctcgactaccgagatggtaaagcacctgattagtggcacactgatttccccccggcagctgccagagttcctgcatatcagcataatcaaggttagaaacgccccagcggcggatttttccctgggcgatcaatttttccatcgctgcgacagtctcttcaaaagcgaaactgccagaccagtgtaataagtaaagatcgagataatcagtattgagacggcgtaaactggcttcgcatgcatttatcgctttttgcccgccagcattccacggatagactttagagacgagaaagaccttctctcgcagaccggttaatgcttccccaaccaccttttcggcaccgccatcggcatacatttcggcggtatcaatgagggttaaaccgagttcaatgcccgcgcgtagtgcagcaacttctgttttgcgctgactggcatcttcgcccatataccatgttccctgccctacggctggcagactgacatcgccactaaattgaatcattttttgttgcattgtttcctcccaggtattgcaccaccgtaatgcaaaacagggcgtgacgccctgtttttatgcacaaaatgccctggaaagatgcattatcagaatttgtaggtgatcccggtagaaatcaggccagtccaggatttatccaccatcgggctgtcagtaacttcatcagacagacgggtgtagcgtgcggtaccgtaaacactccagtcgccgaggaagttgtagctggcgctcagctccaggtaagggctccagctgtcgttcgggttatagccacgcagaccgctgcgagcggactctttgcggcttacgccataatagtattcgttctggttttcgctgttccactgcacaccaatacccggagtcacggtcaggccaccgttggtgtaacgatacaaccaggccatatcccagacgatgccgttgctgttatccagggtatcgccagccagggtggtacgcaggtaaccgtactgggtaaagtgagcataagacagaccagccatcatggtgctcttacggtcatccaggtgacgcatttggtgatcgccactgtctttcgctttgaagtaaagcgggctccagtaagcggtaatactaagtttatccgttgcgtcattccacaggtagtaaccaccacctaagccacggaaccagaagttatcgccttcatagttgattaccggtactgggtaaacatcggtatcgtaatctttatatgggtgttcaacgacacctacgcctgcgcccagggaaaatttaccttcagcgtgcgctacgcctgcagacgttgcgataagcactccaagtgccagaagtttgagtttggtcacaattaatcattccttaaacaaatgtttagcgggcgacaaagtttacccgtcaatacatcgaaacccaacctttttacgttttcattttttaaagtaactgtttaattttcctgacgcggatgacaccgcgcttacagccaaatgaatttagcgttactggcgagcctggtctttacattaattatgcaaaatttatggatgagttgttgatatgccattgaaattaagaaagccgtgcaggcaagttttccatttgccatctacgcttaattttgaaggtgtatcaccgggcacgttgttctcatcgtcgataaaatggcatgagagttgctgtgttttagcaagagacgtcgttcagtttacctcttccgggagcctctactattcatatgaacggctcttaacctgtgctaaaaaacgaaaggacggcataccatgaatatattcgatcactatcgccagcgatatgaagctgccaaggacgaagagttcacactgcaggagtttcttaccacttgtcggcaagatcgcagtgcttatgccaacgcggctgagcggctattgatggctatcggtgagcctgtcatggtcgatacagcccaggaacccagactttctcgactcttttctaaccgggtcattgcacgttatccggcgtttgaagagttttacggcatggaagacgcgattgaacagattgtctcttatctgaaacacgcggctcaggggctggaagagaagaaacaaatcctgtatctgctggggcctgtgggtgggggtaaaagtagccttgctgagcgactgaaaagtttaatgcagctcgtaccgatttatgtattgagcgcgaacggtgagcgtagcccggtcaacgatcatccgttctgtcttttcaatccgcaggaagatgcgcagattctggaaaaagagtatggcattcctcgccgttatctcggcaccatcatgagcccgtgggcggcaaaacgcctgcatgaatttggtggcgatatcactaagttccgggtagtgaaggtctggccgagtattctgcaacaaattgctatcgccaaaacggaacccggcgatgagaacaaccaggacatctccgcgctggttgggaaagtcgatattcgtaaactcgaacactacgcgcagaatgacccggacgcctacggctattccggtgcgctgtgccgcgccaatcaggggatcatggaattcgttgagatgtttaaagcaccgattaaagtgctgcatcccttgttaaccgccactcaggaaggtaactacaacgggacggaaggtatctccgccctgccgttcaacgggattattctcgcacacagcaacgagtccgaatgggtcactttccgtaataacaaaaacaacgaagccttcctcgatcgtgtttacatcgtgaaggtgccgtattgcttgcgcatttccgaagagatcaaaatctacgagaaattgcttaatcacagtgaattgactcacgccccatgcgcccctggcacgctcgaaacactgagtcgtttttccattcttagccgcctgaaagagccagaaaactccagcatttatagtaagatgcgggtttatgatggcgaaagtctgaaagacaccgatcccaaagccaagagctatcaggaatatcgtgactacgccggtgtcgatgaagggatgaacggtctgagcacgcgttttgcgtttaagatcctctcccgcgtgttcaacttcgatcatgtagaagtggcagcaaacccggtccatctgttctacgtcctggaacagcagattgagcgcgagcagttcccacaagagcaggcagaacgctatctggagttcctgaaaggttatctgatcccgaaatatgccgagtttatcggcaaagagatccagacggcctaccttgaatcctattccgaatatgggcaaaacattttcgaccgttatgttacctacgcggatttctggattcaggatcaggagtatcgcgatccggataccgggcagctgtttgaccgcgagtctcttaacgccgagctggagaaaatcgagaaaccggcggggatcagtaatccaaaagatttccgcaacgagattgttaacttcgtactgcgcgccagagcgaataacagcggacgcaatccgaactggaccagctatgaaaaactgcgcacggtcatcgagaagaaaatgttctccaataccgaggagctgttgccggttatcagctttaacgccaaaacgagtaccgacgagcagaagaaacacgacgactttgtcgaccgtatgatggaaaaaggctacacccgtaaacaggtgcgtttactgtgcgaatggtatttgcgcgtacgtaaaagctcttaacaaccctggcccggtacacatgttaccgggcctacaacgacagcgaaccgtgggcctgagaagcggcaacacaggcgtagcatacagttggcaaatgtagtacggggggcatatgacctggtttattgaccggcgtctgaacggcaaaaacaaaagcatggtgaatcgccagcgttttttacgccgttataaagcgcaaattaaacagagcatctccgaggccattaataagcgtagcgtgactgacgtcgacagcggcgaatccgtatccattcccacggaagatattagcgaaccgatgtttcatcaggggcgtggcggtctgcgccaccgcgtgcatccgggcaatgaccatttcgtccagaacgaccgaattgaacgtccccagggtggcggcggaggttccggcagtggtcagggccaggccagccaggatggtgaaggtcaggatgaatttgtctttcagattagcaaagatgagtatcttgatctgctctttgaagatttggccttaccgaatctgaaacaaaaccaacaacgccagctgaccgaatataaaacgcatcgggcgggttataccgctaacggcgttccggccaatatcagcgttgtgcgtagtttgcagaacagtctggcgcgacgcacagccatgacggcaggcaagcggcgggaacttcatgcactggaagagaatttggccatcatcagcaacagtgaacctgcgcaactgctggaagaggaacgtctgcgcaaagaaattgcagaattacgtgccaaaattgaacgcgtcccttttattgacaccttcgatttacgttacaagaactacgagaagcggcccgatccctccagccaggcagtgatgttttgcctgatggacgtttccggtagtatggatcaatccactaaagatatggctaagcgtttttatattctgctgtatctgttcctcagcagaacgtataagaacgtggaagtcgtatacatccgccatcatacccaggcgaaagaagtcgatgaacatgagtttttctacagccaggaaacaggcggcaccattgtttccagcgccctgaaactgatggatgaggtagtgaaagagcgttataacccggcacagtggaatatttacgctgcacaagcaagcgacggcgataactgggccgatgactctccgctttgccatgaaatcctggcgaaaaaattattacctgttgttcgttattacagctatatcgaaattacccgtcgtgcacatcagacattgtggcgagaatatgagcatctgcaatctactttcgacaactttgcgatgcagcacatccgcgaccaggatgatatttatccggtgttccgtgaactgtttcataaacaaaatgcaacagctaaaggctaaaactatcagccaggtcattatcgcctggctgatttttagcttactgtaaattatctcatttattacatacattagcttacaatcgctttaaatatgacagcataacctttacataatttagttccagaaaacaatcattcggaaaaatgattcagagtacacgtatttccatggggttattctttaaatattttttaagcttaacgaaaattgatcctggtcaaaactatatatctctgccaagtataaaatccagcactcacattgctctcctttttatggtttctatgggtacacaaaaattaaaagctcaaagcttttttattttcagtttattgctgacgttaattttattttgcattactaccttatataacgaaaacacaaatgtaaaactcatcccacagatgaattacctgatggttgttgtggctttgtttttccttaacgccgtcatttttcttttcatgttaatgaaatatttcactaacaaacaaattttaccaacactcattttaagccttgcatttttaagtggccttatctatttagttgaaaccattgtaattatccataaaccaattaacggcagtacactgatccagacaaagagcaatgatgtttctattttctatattttccgccaactcagttttatttgtttaaccagcctggcgctcttttgttatggaaaagacaacatccttgacaacaataagaaaaaaacgggaatcctgttgctggcgctgatcccttttttagtttttccccttctggcacacaatctgagcagttataacgctgactattctttgtatgtcgtcgattactgtccggacaaccatactgcgacctggggaatcaactatacaaaaatattggtttgtctgtgggcatttttactgttctttattatcatgcgcacacgattagccagcgaactatggccgttaatagcattattatgtctggcaagcctatgctgcaacttacttctactgactctggatgagtataattatactatctggtatatcagtcgcgggattgaagtttccagtaaactgtttgttgtgtcttttctgatttataacattttcaggagctgcaactctccagcaaactggcagttcatgatgtgctgaccaatatttataatcggcgctactttttcaacagcgtagagagtttattgagccgacctgttgttaaggacttctgtgtcatgctggttgatattaatcagttcaaacgcatcaatgcccaatggggacatcgtgtgggtgataaagtgctggttagtattgtcgatattatccagcaaagcatccgccccgatgatattttagcgcgactggagggtgaggtgtttggcttgctatttaccgaactcaatagtgcccaggcaaaaatcattgcggaacgtatgcgtaaaaatgtcgaactcctgaccggctttagtaacagatatgatgttcctgaacaaatgaccatcagtattggcacggtttttagtacgggtgacacgcgtaatatcagccttgtcatgacggaagcagataaagccttacgcgaagcgaaaagcgaggggggcaacaaagtgattattcatcatatttaagtgcaaaaatattcagagccatgctttttgcgtggcttttgcatacaatttattactattacccctaaatttcccctccccagcggcgcagagatgagtataattagcgcccctgtgccaggccgcaatcgaactttatctggttttctcgtttcactaaccgaaggagatgcgtataaagcttccgatgagcgtttatatgtcaataagcagaacaaaaacagccgttcatgataaccttctgtggttgtttgcttgtaatctcaggagcgtgaaatgactgaaatggctaaaggaagcgtgacgcatcagcggttaatcgctttattaagtcaagaaggtgctgacttccgcgtcgttacccatgaagcggtaggtaaatgtgaagcggtgagtgaaattcgtggcaccgctctaggccagggtgctaaggcactggtatgtaaagtcaaaggcaatggcgtaaatcaacatgttctggcgatcctcgcagccgatcaacaggccgatctgagccaactcgccagccatataggcggattacgcgctagcttggccagcccggcggaagtcgatgaactcacaggctgtgtcttcggcgcgatcccccctttcagcttccatccaaaactcaaactggttgccgaccctctactcttcgaacgatttgatgaaatcgccttcaatgcaggcatgctggataaatccgttattttgaaaaccgcggattatttgcgcattgcgcaaccagaactggtcaatttccgccgcactgcgtaattagccggtccgttcgataagaagaacggacaaaaccagtacaacagcaatggcaaaaaagctactcgtgataatcagtgtctcgacaaacatttgatcgttcatagcatgcccccgggagatagctgttttcacgttattgttagcgtgcacaaatggcagtttgatgacagttcgcctgattttttatgcaaaaaacgtaaagattttctacttccttcctgcagcaagcgtaaagtaagcaggcttattattttttggcaaggaaaccacgatgtttgatgtcactttgctgatcctgctcgggttagctgcgctgggctttatcagtcataacaccactgtcgccgttagtattctggtgttaatcattgtccgcgtcacaccgttaagcaccttttttccgtggattgaaaaacaggggctaagtatcgggataatcattctgacgattggcgttatggcccccatcgccagcgggacgctaccgcccagtaccttgattcacagctttctgaactggaaaagtctggtggcgattgcagtaggcgtgattgtctcctggctgggtgggcgcggcgtgacgttaatgggcagccagccgcaactggtcgccgggctgctggtaggcactgttttaggcgtagcgctgtttcgcggcgtaccggttgggccgcttattgccgcgggtctggttagcctgattgtggggaaacagtaattattgccgcgggtctggtttcgcactttgtggggaaacagtagttaatctcgcaatatatcggcctggcgtttgccccaggcctttcttaaacatagtaataaaggccgttgtactatcataccccagcgtatgagcaactttctgtacagtatcgcctttcactaatccctgaagcgccataatcagctgtaactgctgacgccactggcgaaaactcaaccccgtctcttttactatcagtcgggcaagattgcgttcactcatcgcaaaaaagccagcccattgccccaatgccccccactcgacaggccctttcgccatcatctccaccatcgtgcggattttaggatgagaagaaacgggcaggtgcagctgttgttgtggctgctgagggagttcatcaaacaggacctgaattaatctgcgggtcattggctcagcacgctgagtcgtcgtcctgtttgccagggttaaaattaattcccggcataaggggcttattttcaatgtgcaacatgttgtcggcattgtcactgcgctgggttcgataaacagaaaacagagttcagcattagctgttacttgattgctatgttccaccccgcccggtatccaaaccgcatattgtggcggcaccatccacaaagcattttccaccgtacaggtaattgcaccatgtagcgccagtatcagctgtcctttgcggtgctgatgtacaggactggttaactcatccgttccggcgtgaatacaaaatgcgaccgcggcttcatggtgtcggtcgggttcatagccattgagattcaacctgtgcatcattttgtccgaacttagcgataatttgtcattttagcttgattcaacataacaataaaaacggtaaggtacagcctcgtttgtaacaatgagaagcatatgacctgtagtactagtttaagcggcaaaaacaggattgtccttatcgctggcattctgatgattgccacaacattacgcgtcacctttaccggcgcagcaccgttactggatacgattcgttccgcttacagcctgacgacagcgcaaaccggcttattgaccaccctgccattattggcctttgcgctaatcagtcctttggctgccccggtagcgcgacgttttggtatggaacgtagcctgtttgccgcgttacttttgatctgtgctggtatcgcaattcgctctctccctagcccttacttattatttggcggtacagcggtcattggcggtgggattgcattaggcaatgtcttactgccaggattaattaaacgcgatttccctcattccgtcgccagacttaccggcgcatattccctgacaatgggagctgcagcggcactgggaagcgctatggtcgtgccgctggctttgaacggttttggctggcaaggcgcgttgctcatgctgatgtgttttcctctgctggctctttttttatggctgccacagtggcgaagtcaacaacatgcaaatttgagtaccagccgcgccttacatactcggggtatctggcgtagtccgcttgcctggcaggtcacattgtttcttgggatcaacagtctggtctattacgtgattattggctggcttccggcgatcctcatcagtcacggctatagcgaagcacaggcgggtagtctgcatggtttgctgcaactagccacagcagcacccggtttgctgatcccacttttcttacatcatgtgaaagatcagcgtggtattgcagcgttcgttgccttgatgtgcgcagtgggcgcggttgggctctgctttatgccagcgcacgcgatcacctggactctgcttttcggttttggttccggcgcaacaatgatactggggttgacgttcattggtctgcgggctagttctgcgcatcaggcggcggcactcagcgggatggcacaatccgtcgggtatttgttggcagcctgtgggccgccgctgatgggtaaaatacacgatgctaacggtaactggtctgtaccacttatgggtgttgccatacttagtctactgatggcgattttcggactttgcgccgggagagacaaagaaattcgctaatatccggtgctatagtgacgtaacaaatcatgcgtgaaagggagaacaaacacgatgaatattcagtgcaaacgcgtttatgatccggctgaacagagcgatggttatcgcatactggtcgaccgcctctggccgcgcggtatcaaaaaaaccgatttagcccttgatgagtgggataaagaaatcacgccgagtacggaactgcgcaaagcctttcacggcgaagtcgtcgattatgcaacctttcgcgagcaatatcttgcagaactggcgcaacacgagcaagaaggaaagcggctggcggacatcgccaaaaaacagccgctgaccctgctctacagtgcaaaaaacaccacgcagaaccatgcgctggtgctggccgactggctacgtagcttgtgattttagtacagcatccggcggttatttttcaccagccggatggtcacgccgccacaatgcccattcatcaatcgtttcaccgcccggtaatttgcaattgttgctgaccccttgcgctgtctgcactggaatgagcgtcccgcccttctgctggcaatagacgctcgccggatttgccataccaatctgcggcggtttaggtgcttctggctgagaaggggtactacaaccagccaggaccagcaagcaaggcagaacaaaactgataattttcatttattgatctcacatatttatccaagattagagtatcgcggtatcgttttgttttgcagcactatttttattacattcactcaaaacatattacgtcttgtttcatctttgttgatgatgttttatcatgcctgcaaagattaaataatcagcatttacccgccgtatcctggagttgttccgtgagtgatcagattatcgcccgcgtcagccaatcccttgccaaagaacagagtctggaaagtctggtccgacagcttctggagatgctggaaatggtcactgatatggaaagtacctacctgaccaaagtggatgtcgaagcgcgcctgcagcatattatgtttgcccgtaacagccagaaaatgtacatcccggagaattttaccgtcagctgggattacagcttatgcaaacgcgccattgatgaaaactgctttttcagcgatgaagtccccgaccgttggggtgactgtattgcggcacgcaatcttggcatcaccacatttctgagcacgccaattcacttaccggatggaagtttctatggcacgctttgcgccgccagcagtgagaagcgccagtggagtgaacgcgcggaacaggttttacagttattcgccggactgattgcacaatatattcaaaaagaggcactggttgaacagctgcgcgaagccaatgctgcgctgattgcgcaaagctataccgacagcttaaccgggctaccgaatcggcgggcgatttttgaaaatctgacgacactgttttccctcgcccggcatcttaaccataagataatgatcgcgtttatcgatctggataacttcaaattaatcaatgatcgttttggtcataatagtggcgatctgtttctcattcaggttggcgagcgccttaatacgctccagcaaaatggcgaagttattggtcgtctcggcggtgatgagtttttagttgttagtctaaacaacgagaatgcggatattagcagcctgcgagaacgcattcagcagcaaatacgtggagaatatcacttaggtgatgttgatttgtattatcccggtgccagtcttggcatagtagaagtcgatcctgaaacaaccgatgcagacagtgccctgcatgctgccgatattgcgatgtatcaggagaaaaaacacaaacagaaaacaccttttgtcgcgcatccagcgctacattcctgaggcgtattcacatccttttgattggtgataacatgcgaatcggtattatttttccggttgtaatcttcattacagcggtcgtatttttagcatggttttttattggcggctatgctgccccgggagcataaagatgaaaaaaacaacgattattatgatgggtgtggcgattattgtcgtactcggcactgagctgggatggtggtaacgtcacctctaaaaaatagcaaaggctgcctgtgtgcagcctttgtgcaatttaagcgttaacttttaatcttcctgtagataaatagcacgacaatcgcaccaataacggcaaccacgaagctgccaaaattgaagccatcgactttaccaaagccaaacagcgtgctgatccatccgccgactacggcaccgactatccccagcaggatagtcataaagaatccacctccatctttacctggcatgatccacttcgccagaataccggcaataagcccaaaaataatccaactcagaatgcccattgtttcctcacttatctgttttgcattagcgggttagtcgctgataaaaagcatagcacaacatcgggagggcaagatttgtgacgagcatcacggaggttttttttgcgatggcgcagaaattgcgccatcaacgatcagtgataattaccaaccacaaacatcatgttcgttttccgtgtcataagaacgtacggtattcaccagatcttttatcacttcagccgccacttctggcaccagcaaagtcatcggcgtctctgtttcataatcgacagaaacgccattgctgttattggtgacggtcacggtatacgttgctttgcccatgattcatttcccgttatgaatgactttccgttgttgcgcaccttccatcaggacttcaggagccacgaagaagtcaatgttgaaataagtatcgtcagtcatggcttcaatgttgtgccacttttctggagggaacaccgcaaactgccccgcttcgataaggatcacctgatcaggctctgcactgtgttcatcagcgtagccgagatatttgaccgccccatgcataacggaaaggcgtgggtaaacccccgggcgcgttcctttatcaagatgacgttcgaatattccggcaggtgcagtttgtttattccagaaaggcgtactgcgcgtatgaatataattctgtgggatttgaagcatccttttccctccttcggtgaatgcgctgaaaacggtttattccagccgtttcagggtacgcctgataatttgcattttaaataccatttattggttactttttagcaccatatcagcgaagaatcagggaggattatagatgggaagcccgcgacaacgcgggctgaaagcatcaggattgcagcgtcgccagtcgggcagcgaaacccacgaacatcaaaccaatcagactgttgccaactttagccagtttctttttggtacgtatgtactgcgtgacaaaagcaccagatataatcaggaagctcaaatagcagaaactcaccagttccagcgtcgccgccagaataaagaaactaattcccgtatgtggggcattaacatcgataaactgtacgaaaaagctcacatagaacaaaatggctttcggattagtcaggctcaaaattaacgcgcgtttaaaaatagcaccgtattggggctcatcggatttggcctcgctatttttacccttcagggtcgcgtaaagaattttactccccagatagagcaaataaaacgcaccaagataacgtacaatgttgaataatatcggggtggtcttaattaatgtcgccactccagcccatgccagaaacatcaataccgcatcgccaataaatacaccgcaggccgcaagataaccgcctttcataccgctactgacgctatttttgagtacaaacagggtatttggccctggcaccaacacaataaaaatggccccaaccagataggtccagtaattcagaaccccgtattcagcgaacacattaacctctttaattatctttcgatcatgcgcgattaaaggtgaatatgctaaccaatctgtagcggcttagaaaggagaaaatcaggttttaacctgatatcaacccgataattgaatcattaatcaggcatgctccagactaaaattcgggtagtgctcggcaaaatactggcgtaaaaattctaccgttatccgcactttcgcactcgtcgccagcctactaacataaacggcccagacgttcgctggctggtaatattccggtagcacttgcactaaatgaccactggcaatgttttcgctaacatcccaccaggaacgcagagcaatcccctgcccatcgagacaccactgatggacaatttctccatgattagagctcagtgggccggtgactttaatcgcatgggggccttctttattgcgtaattgccagacaccaaaaggatgatcgcgctctttaatgaccaggcacggcaatgcagaaagatcggttaaatgtttcggcgcgccatgttgcgcaataaattccgggctcgcgcagagaatacggtaattggtcgccagtttgcgggcgattaaattaggggcgatgtcatcgccaatgcgaatatcgagatcgacaccttcattgaccaaatcgaccagtcggtcttccacatcaaaacgtaattccagttgcggatacgccttcgccagcgctaataacgccggagccaccacctgtcgtccaaaaccaaagctgctgataatacgcagcatcccctgcggcacctgacgcacgtcagaaagttcgtccatcatctgaccgacatcctgcaaaatccgctgcgcccattcataaatccgctctccttcttcggtaatggtgacgcggcgggtggtgcggtgtaacaacaccacgtttagcgtttgctccagcaaggcgatgcgcttgctgacgaacgccggactaacgcccagttcttccgccacggcggcaaaaccagcccggcgagccaccagcataaagacgcgcaaatcattcagcagcggtaaattattcatgattcgtgttttatgtttcaccagttacggggattaattccttttcagtcaattataggatggtgatgttgtcaattttgatggtcaggaagtgagaacccaatgatgaaaacgatgcgtattgctgcgatcccgggagacgggattggcaaagaagtccttcctgaagggattcgcgtgttacaggctgccgctgagcgctggggcttcgccttgagttttgagcaaatggagtgggcgagctgcgagtattacagccatcacggtaaaatgatgccggacgactggcatgagcaacttagccgtttcgacgccatctattttggtgccgtcggctggccggataccgttccggaccatattagcttgtggggtagcctgctgaaatttcgtcgtgaattcgaccagtacgtcaacctgcgcccggttcgtctctttcctggcgttccctgcccgctggcgggaaaacagcctggcgacatcgatttttacgtggtcagggaaaacaccgaaggcgaatattccagcctcggcggtagagtgaatgaaggtacagagcatgaagtcgtcattcaggaaagcgtatttacccgccgtggtgtcgatcgcattttgcgttatgccttcgaacttgcgcaaagccgtccacgtaagacactaacttctgccactaaaagcaacggtttagccatcagcatgccgtactgggatgagcgagtggaagcaatggccgagaattacccggagatccgctgggacaagcagcatattgatattctctgcgcgcgttttgtgatgcagccggaacgattcgatgtggtggtggcgtccaatttgtttggcgatatcctttccgatcttggcccggcctgcaccggcaccattggcattgccccatccgccaacctgaatccggaacgcactttcccgagcctcttcgagcctgtccacggttccgcgccggatatctacgggaaaaatattgctaaccctatcgccacgatttgggccggggcaatgatgctcgattttctcggcaatggcgatgagcgtttccagcaagcgcataacggtattctggcagcaattgaagaagtgattgctcacgggccgaaaacacctgatatgaaaggcaatgccaccacgccacaggttgccgacgcgatttgcaaaattattttgcgttaaggtcaaaccagtttatttgaaccgcgtcactgacgcggtttttttattcgttctttgcagtaaataacctgcgtcatttcaccttttattgtttccgtttcgtgttttatggctttccgtattcttaattgtttaatttatgtaacatgcaaattttgttacgcgtacgttaggttccgccgtacaggtattggttttgctggcaatgggactggtgatttatttagccaccagtaaatacggcaatattcgtcttggcgaaggaaaaccggaatacagcacgctctcctggctgtttatgtttatttgtgccggtttaggttcttctacgctttattggggggttgctgaatgggcctattattatcaaacacctggattaaatatcgcaccgcgtagtcaacaggcactcgaatttagcgttccctactctttcttccactggggcatcagcgcctgggcaacttatacgctggccagtttaatcatggcttatcactttcatgtgcggaaaaacaaaggtctgagcctttccggcattattgctgctattaccggcgttcgcccgcaaggcccatggggaaaactggtcgatttgatgttcctgatcgccactgtcggcgcactgaccatttcccttgttgttaccgcagcaacctttacccgtgggctttccgcgctgaccggtttacccgataacttcaccgtgcaggcatttgtgatcctgctttccggcggcattttttgcctaagcagctggattggtatcaacaacggtttgcaacgtctgagcaaaatggttggctggggcgcgttcctgctgccattactggtgctgattgtcggcccaaccgaatttattaccaacagcatcatcaatgccatcggcctgaccacgcaaaacttcctgcaaatgagcttattcaccgatccgcttggcgatggtagttttacccgcaactggaccgttttctactggctgtggtggatcagttacacccctggcgtagcaatgtttgtcacccgcgtttcccgcggtcgtaagattaaagaagttatctggggactgatcctcggcagcaccgtcggttgctggttcttctttggcgtaatggaaagctatgccattcatcagtttatcaatggcgtaatcaacgtcccacaggtgctggaaacactgggcggcgaaacagctgtacagcaagttctgatgagcttgccagccggtaaattgttcctcgccgcatacctgggcgtgatgattattttccttgccagccatatggatgcagtggcctacaccatggcggcgaccagtacgcgtaatctccaggaaggtgacgatcctgaccgtgggctgcgtcttttctggtgcgtggtgatcactctgatcccgctttccatcttgtttaccggtgctagcctggaaacgatgaaaaccaccgtcgtgctcacagcccttcccttcctcgtcattttactggtgaaagtcggcgggtttattcgctggctgaaacaggattacgccgacattccggctcatcaagttgaacattatctcccgcagacaccggttgaagccctggaaaaaacgccagtgctccctgcgggaaccgtattcaaaggcgacaactgagcgccatcatcctaacgataaaggtatccctatgagcaatctgagccctgactttgtactacccgaaaatttttgcgctaacccgcaagaggcgtggaccattcctgcccgtttttataccgatcagaacgcgtttgaacacgaaaaagagaacgtcttcgccaaaagctggatttgcgtcgctcacagcagcgaactggcgaatgccaatgattatgtgacgcgtgagatcattggcgaaagcatcgtgctggtacgcggtcgtgataaggttttgcgcgcgttctataacgtgtgtccgcaccgtggtcatcagttgttgagcggtgaaggaaaagcaaaaaatgtgattacctgcccgtatcacgcatgggcattcaaactcgatggcaacctggcccatgcacgtaactgcgaaaacgtcgccaatttcgatagcgacaaagcgcaactggttccggtgcgtctggaagaatatgccggattcgtcttcatcaacatggaccccaacgccaccagcgtagaagatcaattacccggcctgggcgcgaaagtgctggaagcctgcccggaagtccacgatctgaaactggcggcccgctttaccacccgcacgcctgccaactggaagaacattgtcgataactatctcgagtgctatcactgtggtccggcgcatccaggtttctccgactccgtacaggttgatcgttactggcacaccatgcacggtaactggacgctgcaatacggtttcgccaaaccgtccgaacagagctttaaatttgaagagggtacggatgcggcattccacggtttctggctgtggccgtgcacgatgctgaacgtcaccccgatcaaagggatgatgacggtcatttatgaattcccggtggattctgaaactaccctgcaaaactacgatatttacttcaccaatgaagagttaaccgacgagcaaaaaagcctgattgagtggtatcgcgatgtgttccgtccggaagatttacgtctggttgaaagcgtacagaaagggctgaaaagccgtggctatcgtggtcaggggcgcatcatggccgacagtagcggtagtggcatttccgaacatggtatcgcccatttccataatctgctggcgcaggtgtttaaggactaatgacatcggcggcggtattttccgccgctgggctgatttttgatggagtacagcaatgagtgactatcaaatgtttgaagtacaggtgagccaggttgaaccccttaccgaacaggtgaaacgcttcacgctggtggcaaccgatggcaaaccattacctgcgtttaccggaggaagtcacgtcattgtgcagatgagcgatggtgataaccagtacagcaatgcgtatagtctactgagtagcccgcatgacacctcttgttatcagattgccgttcggctggaggaaaacagccgcggcggttcccgctttttgcatcagcaggtaaaagtgggcgatcggttaacgattagtacgcctaataacctgtttgcgctaattcccagtgccagaaagcatctgtttatcgcgggcggtattggtatcacccctttcctgagccacatggcagagctgcaacacagcgacgtcgactggcagctacattactgcagccgaaatccagaaagttgcgcatttcgtgatgagctagtccagcatccgcaggctgagaaagtccatttgcatcatagtagtaccggaacacgactggaattagcgcgattattggcggatatcgaacctggcacacacgtttatacctgtggccccgaggcgctaattgaagcggtaagaagtgaagctgcgcgtctggacatcgccgccgatacgctgcactttgagcaatttgctatcgaagacaaaaccggcgatgcatttaccctggtgcttgcccgttccggaaaagagtttgtggtgccggaagagatgactattttgcaggttattgaaaataataaagccgcgaaagtggaatgtttatgtcgtgaaggggtatgcggaacctgcgaaacagcaatactggaaggtgaagctgaccatcgggatcaatattttagcgatgaagagcgtgccagccagcaaagtatgttgatctgttgtagccgtgcgaagggtaaacgcctggtgttggatttgtaatttgccgaagccggatgtggcgctgagcgcgcccagtccggcttcggaagattttactgcggatattcctgcaataaattgtgtaatgcttccgccatcagctcaccacgccagccggaaatcagctccggcaaattgttctgcggtttcagtttccagtgccagttcagcagttggttgatttgccgacggcttgccagcaattcggcgctgatcttatgcgtttcgctcacgtcagtaatcaggctcttaatcgctttaaacgctttacgataacccggcatgtccatcaggttaagcatcggctgcggtaaggcatcttccggcaatgtctgcgctttttccaccagcgctagcagcgttttaccgtgaaagcggatttcgctaccggataaacccaggctgtccagttcgcctaaacttcccggcatataacgcgctacgctccacaaatgctcttcacgcacgacaaagttcaccgccagatcgcgctctcgcgccttgcgcagtcgccagtcggctaacagttgcagacaggccagttggcgtgtgcgtaattgccaggcattggtgatatcacgccaggcatcttccggcgcaacgacttcctgacgacgcatttgcatcaggcggcattcatccagcgccgcaggtagccagccggaggcctccgtttctaccataagcttggcggtgatcggtaacagataccagacatccgccgctgcgtattcacactgacgttcggtcagcggtctggccagccagtcggtgcggctttcactcttgtccagcgtaacgccggaatactcttccaccatggaagcgaaaccccaactcatcgggcgtccgcagaaggcagcaaggatttgcgtgtcaatcaagggttgtggtaattcgccaaagacattgaggaacacttccagatcttcactgcctgcatggagaaattttgtgatggacggatcgcgcaggatcgctttcagcggactccagtcggtgatcccgagtggatcgattagcgccagatgctcgccatcgaaaagttgaatcaaccccagctgcgggtaataagtgcgcgtacgaacaaattcagtatccagggctatcgccggaaaggcacggacggcttcacacaaagaagccagcgcatcgtccgtggtaatcatttggtaattcaaattgttttctctttagtgggcgtcaaaaaaaacgccggattaaccggcgtctgacgactgacttaacgctcaggctttattgtccactttgccgcgcgcttcgtcacgtaattctcgtcgcaaaatttttccgacgttagatttcggtaactcatcacgaaactccaccagcttcggtactttgtatcccgtgagctgacggcggcaaaaagtcaccagactctcttcggtaaggcttggatcttttttcactacgaagattttcaccgcttcaccactggagccggaaggtacgccaacagccgcgacttcctgtacgccaggatgctgcatgacgacatcttcaatctcgttgggatagacgttaaaaccggaaaccagaatcatgtcttttttacgatcgacaatgcgcaggaatccttcttcatccattaccgcgatgtcgccggtgtgtaaccagccatttttgatgatttcatcggtagcatcgggacgctgccagtaacccagcatcacctgcggtcctttgacacaaagctcacccggttgacctggtggtacttcattatcatcatcatccaccagtttggcttccgtgctcggcaccggcaaaccgatgctaccactatgataatcaatatcatatgggttaacgctgaccagcggcgcacactcggtaaggccatagccttccagcagatactgtccggtcagtttcacccaacgctctgccaccacttgctgcactggcatcccaccgcctgcggaaagatgcagactggagaaatccagctgctggaactctttattgttcagcaacgcattgaacaaggtgttaacgcccgtgatagcggtaaacggatatttcgctaactcttttaccaaccctggaatatcgcgcgggttagtgataagcaggttctgcccacccagttcgataaacagcaggcagttaatggtcagggcaaaaatgtgatacagcggcagcgccgtcaccaccagctctttgcccggatgcaacagcggaccataggtcgcgttaacctgttccaggttcgccagcatattgcggtgagtcagcatcgcgcctttcgccacaccagtggtgccgccggtgtattgcagaaaagctaaatcttccggcaccagttcgggtttgacgtactgcatccggtagccgttatgcagtgcgctacgaaaactaatggcatctggcagatggtatttcggcaccaaacgcttgatgtatttaacaacgaaattgactaccgtgccttttgccgtagatagctgatcgcccatacgggtcagaattacgtgctgaacggcggttttatcaaccactttttccagtgtgtgagcaaagttagacacgataacaatcgcgcttgcgccgctatcgttaagctgatgctcaagctcacgcggggtatacaacgggttaacgtttacgacgatcatcccggcacgcaaaatgccaaacagcgccaccggatattgcaataaattaggcatcatcaacgcaacgcgatcgcctttcttcagccccaacccttgttgcaaataagcggcaaacgcgcgactgcgttcttccagcttgcggaaggtcattacctcccccatattcacaaacgcaggttgatcggcgtagcgcgcgacgctctgctcaaacatatctaccagagattgataacggtcagggttgatctccgtcggaacgtccgcgggataacggttaagccaaaccttcttcaattcttcacctctaaaatgcgtgttcgtcgtcatcgcaaccccaaatgatatacatgccgttaacataatattaactcatcataccagcttgataattacccaacgaaaaggttgcgaagcgcgtcactatttatttttatctttaccgtaagaatgcagaaacagcggaccagccgctgtttctttttctttaaaaacaagcaattattcagttacaactgtttgtactctcgcggggccgggattataccagccccatccgccgtagccatagggccagccacgaccgccataaaaccatggatcaatcggctgaggcggcataatcacctgctgggttaaatgccaacgtttgtaacccgttacttgcatcaccataaatttatagggcgtattgccgattttgccgtcaaccgcaccagtgattggcccgactaccgtaaccagttgtccacggaaatccaccgggtccagaaaaccgttcacatcggcataaatgcgaccgcgagaaggttctcccagcgtcggtctggctccgctgtccagcggtacggtagcaatttccaggcgagttttcccttgctggttttgtaccgcaaccactttgccaccaaagcgtgcctcctgaccaacgtacagctgcggcgcactcatcacccgaactaaatcttgttgcggcgtgggactgctgcctttaatggcgtccggcacagtgacacaaccgctcagcattagcgcaaacgtacctgccagtatgcctttgataacattcttttgaaccgccatggtgcgactcctttttttctcagggcatactcttaagattcattctttgcccggaagtttcttccatgcgacgttgttacgtaaataaaccggttcggcatgttccaccgccaccgttttaccctcagcaaacatctgacacgcaatcggcagcatatcttcagcagcaggcagtaacacttcgccatcgcgcaaaaccagcccgctctctttaccgagatccggccaagcttgccagcccgtccctaccgtcacccattcgccggaaagctgttgcattcgttcatggacgatttcgggtttgagtacggcttcggtttcttcaccgtgccagataccgttttcatcacgctgatattcggcccagtaaacttcgcccattcgcgcgtcaatggctgccagcacgcgggttgcgccgtttttgcgccacgccccttgcgccatcgtcattagcgtggagacgccaatcatcggtaattccgcgccaagcgccagcccttgcgcgatgccaataccaatgcgcacgccagtaaagctaccggggccgcgcccgtaagccagagcgttaatatcagtcagggaagttccgctggtggtcaggatatcctgcaccatcggtaagattcgttgagtatgttcacgagggcaaagctcaaaatgagcgttgacagtaccgtcgttccacagggcgacagagcaggcctctgtcgcggtatcgatagccagaattcgcatgggtcttcgtgcttagatcaataaaaaggcgcgcatcataccatactccgtaacaaattacctggaggatggtatcgcaaggaaacgaaccgcacgggcaatgtcacgggtgcgtggcgcgggcggcagactggcgagaaacgtcgcgccgtaaggacgcatcaccagccgattgtcacaaatcaccagcacgccacgatcgtcggcgtcgcgaatcagtcgccctaccccctgtttgagagtaatgacggcatctggtagttgcacttcatcgaacgggtcgccaccgcgcaaacgacaatcttccatgcgcgcttttaacagtggatcatccgggctggtaaacggcaatttgtcgataattaccaaactcaatgtatcgccacgcacgtccaccccttcccagaaactgctggttgccacaagaagcgcattaccggcgctgacaaattgctgcaacagttgccctttgctggtttccccctgcaacaatacaggaagcgtcatggtagcgcggaactgctcggccagatcgcgcatcatggcgtggctggtacaaagcataaaacaacgaccgttgttagcttcgatgatcggtcgcagcattgccgctaactggcgagcagaacctggctggttggtttgcggcagattgcgcagcacacagagtaacgcctggcggctgtaatcaaatgggctgggcaacagcaagctctcggcctgttcgatgccaagccggctggtgaaatgatgcagatcgtcgttcacgctcagcgttgcactggtgaagatccagctaccgggtttttgcgccattaactctttgaatttatccgccacgctgagcggcgtgagagccagagtaaaatggcggctagtgcattcgtaccagtagctgtagcccggctgattgatctcttttagccgcttcagccgtgtgcgatacaacgtggcgcgctcaaatgccgcatccagcaaggcggaacgccccagactcagtttcgccacgtcataacaaagttccagggtgtcatcgagcagtaaaaatgcccgctgaatttgcggattagctaacagctcacgcaggttaccgcgataacctggctcaccgagttgcagacgaaaatcctgcgcactctgggcaagacgatcagcgcacttttgtaactgctgggtgtcttttaattcggtgcggtaggcgatggtgatgtcttttgccaggtcgagcagttgtcgactggagagactctgaccaaaatactggctggcaatgtccggtagctggtgggcttcgtcgaagatcatgacgtccgcttccgggatcagttcgccaaatccactctctttaaccaccatatccgccagaaagagatgatggtttaccaccaccacatcggcgtccatcgcttttttacgtgctttgaccacaaagcaatctttatacatcgggcagtcgctgccaagacagttgtcgttggtgctggtgaccagcggccacgcctgactatcttccgccacgctgacgcaggtgctgatatcaccatcgactgtttgattagaccaggagcgcagcaggatcacatcgcttaagatttgtaccggcagatcgccccccgccagcgcctgctgttcgagacgttcgaggcagaggtagttactgcgccctttcagcagcgccacgttgcccgtatatttcaatgccttactgactgttggcaaatcgcggctgtagagctgatcctgcaacgctttactgccggtgctgataatgactttctttttcgcccgcagcgcaggagccaggtaagcgtaggttttgcccgtaccggttcctgcttccaccaccagcggctggcctttttctatcgcctgggtgacggctaccgccatctgtcgctgtggttctcgcggcttaaagcctggtatcgctttcgccagctgaccgtctggtgcaaaatcgtccgtcacactaccccctgttgatttgaacagggattatgtcaggatgagggcgctttcgccagttgaagtggtgacggcgacctcacattgtggcagtctttgcagcacgaaaatggaagtataatgaggacaaaatgatgactatcgttcgtatcgatgctgaagcccgctggtctgatgtagtaatccacaacaacacgctctactacactggtgtaccggaaaacctcgacgccgatgcctttgagcaaaccgccaacacgctggcacagattgacgccgtgctggaaaaacagggcagcaataaaagcagcattctggatgccaccattttcctggccgataaaaacgacttcgcggcgatgaataaagcgtgggatgcttgggttgtcgcgggtcatgcgccggtgcgctgcacggtacaagcgggtttgatgaacccgaagtataaagttgaaattaagattgtggctgcggtgtaagctttatcgaagcaaaataagtcagacgataatttatcgataatactggtcggttttacataaatcgaccagagaataagatattactgttgatgcttctgctaattcattatttatatttataatttcaattttatctataaaactaactatataaataaacataaacatgccgttgtgttcgccctttgattagcaactctggttttctttcttagctgaacaatctggttatagcgtgcggactgaccgttaaatttctccatcttactggataacacaccatgagctgctacctttaaaacacctgaatgtcaacaggttaactcgtgccatatcgttataatccctttgatattagatgcaaattaaggtcatatatagccttatcgataacatggttaattttaaggataagaatatgcctgctgtaatagataaagccctggatttcattggtgccatggatgtaagtgcgccaacaccaagtagcatgaatgaaagcacggcgaagggaatctttaaatatttaaaagaactgggagtacccgcgagtgccgctgatattacggcgcgagctgaccaggaaggctggaaccctgggttcacggaaaaaatggttggatgggcaaaaaaaatggagacaggtgaacgttctgtgattaaaaatcctgaatactttagtacatatatgcaggaagaactaaaagcactggtctgagttaaatttatatcagcataaatgggtcaggacgcttttaatcacatataaaaagcgtcctttttctcacaatcaaatgatcatcggcttctataacgaaatcgatacggattagtgtgttactcgtcttcatcctcaaaacgcgccacgattcgctcgccggagtggttggcacgcagctcttctgccaccagcgcgattgcctggccgctgctcatcccttgtgccatcagttcctggatccgctcgacagctttttgctgctgttcatgggtgagactaggtaaacctgcaaacattgttaactcctgctaaattgttggcgctaattatttcatgctacccggcacatagccagtagagtcaggactgatgaagacgttatctcccgctgtgattactttactctggcgtcaggacgccgctgaattttatttctcccgcttaagccacctgccgtgggcgatgcttttacactccggctatgccgatcatccgtatagccgctttgatattgtggtcgccgagccgatttgcactttaaccactttcggtaaagaaaccgttgttagtgaaagcgaaaaacgcacaacgaccactgatgacccgctacaggtgctccagcaggtgctggatcgcgcagacattcgcccaacgcataacgaagatttgccatttcagggcggcgcactggggttgtttggctacgatctgggccgccgttttgagagtctgccagaaattgcggaacaagatatcgttctgccggatatggcagtgggtatctacgattgggcgctcattgtcgaccaccagcgtcatacagtttctttgctgagtcataatgatgtcaatgcccgtcgggcctggctggaaagccagcaattcagcccgcaggaagatttcacgctcacttccgactggcaatccaatatgacccgcgagcagtacggcgaaaaatttcgccaggtacaggaatatctgcacagcggtgattgctatcaggtgaatctcgcccaacgttttcatgcgacctattctggcgatgaatggcaggcattccttcagcttaatcaggccaaccgcgcgccatttagcgcttttttacgtcttgaacagggtgcaattttaagccttagcccagagcggtttattctttgtgataatagtgaaatccagacccgcccgattaaaggcacgctaccacgcctgcccgatcctcaggaagatagcaaacaagcagtaaaactggcgaacagtgcgaaagatcgtgccgaaaatctgatgattgtcgatttaatgcgtaatgatatcggtcgtgttgccgtagcaggtagcgtaaaagtaccagagctgttcgtggtggaacccttccctgccgtgcatcatctggtcagcaccataacggcgcaactaccagaacagttacacgccagcgatctgctgcgcgcagcttttcctggtggcagtataaccggggctccgaaagtacgggctatggaaattatcgacgaactggaaccgcagcgacgcaatgcctggtgcggcagcattggctatttgagcttttgcggcaacatggataccagtattactatccgcacgctgactgccattaacggacaaattttctgctctgcgggcggtggaattgtcgccgatagccaggaagaagcggaatatcaggaaacttttgataaagttaatcgtatcctgaagcaactggagaagtaagacgtggaataccgtagcctgacgcttgatgattttttaagccgctttcaacttttgcgcccgcaaattaaccgggaaaccctaaatcatcgtcaggctgctgtgttaatccccatcgtccgtcgaccgcaaccggggttgttgctgactcagcgtagcattcatctgcgtaaacacgctggacaagtggcattccctggaggtgcagtcgatgacacggacgcaagtgctatcgccgccgcgctgcgcgaagctgaagaagaggtcgctataccgccttccgccgttgaagttatcggcgtgctgccgcccgtcgatagcgtcactggctaccaggtaaccccagtggtcggcattatcccgcccgatctgccgtatcgcgccagtgaagatgaagtcagcgcggtgtttgaaatgccgctcgcccaggcattacatctgggtcgttatcaccctttagatatctaccgccgtggtgatagtcatcgggtatggctgtcctggtacgaacagtattttgtatggggaatgaccgcaggcataattcgtgagctggcgctgcaaattggtgtgaaaccctgactatacttatctttacatctacaaaacactacttgagacaatcatcgcaatattagttaaatcgcggtttttgattagtttaattcatgtgaatagttaagccagtcgccgcgttccctcttacactatgcgctgttattagttcgttactggaagtccagtcaccttgtcaggagtattatcgtgattagtctattcgacatgtttaaggtggggattggtcccagttcttcccataccgtagggcctatgaaggcaggtaaacagttcgtcgatgatctggtcgaaaaaggcttactggatagcgttactcgcgttgccgtggacgtttatggtagtctgagcctgacgggtaaaggccaccacaccgatatcgccattattatgggtcttgcaggtaacgaacctgccaccgtggatatcgacagtattcccggttttattcgcgacgtagaagagcgcgaacgtctgctgctggcacagggacggcatgaagtggatttcccgcgcgacaacgggatgcgttttcataacggcaacctgccgctgcatgaaaacggtatgcaaatccacgcctataacggcgatgaagtcgtctacagcaaaacttattattccatcggcggcggttttatcgtcgatgaagaacactttggtcaggatgctgccaacgaagtaagcgtgccgtatccgttcaaatctgccaccgaactgctcgcgtactgtaatgaaaccggctatagcctgtctggtctcgctatgcagaacgaactggcgctgcacagcaagaaagagatcgacgagtatttcgcgcatgtctggcaaaccatgcaggcatgtatcgatcgcgggatgaacaccgaaggtgtactgccaggcccgctgcgcgtgccacgtcgtgcgtctgccctgcgccggatgctggtttccagcgataaactgtctaacgatccgatgaatgtcattgactgggtaaacatgtttgcgctggcagttaacgaagaaaacgccgccggtggtcgtgtggtaactgcgccaaccaacggtgcctgcggtatcgttccggcagtgctggcttactatgaccactttattgaaagcgtcagcccggacatctatacccgttactttatggcagcgggcgcgattggtgcattgtataaaatgaacgcctctatttccggtgcggaagttggttgccagggcgaagtgggtgttgcctgtagtatggctgctgcgggtcttgcagaactgctgggcggtagcccggaacaggtttgcgtggcggcggaaattggcatggaacacaaccttggtttaacctgcgacccggttgcagggcaggttcaggtgccgtgcattgagcgtaatgccattgcctctgtgaaggcgattaacgccgcgcggatggctctgcgccgcaccagtgcaccgcgcgtcagcctggataaggtcatcgaaacgatgtacgaaaccggtaaggatatgaacgccaaataccgcgaaaccagtcgcggtggtctggcaatcaaagtccagtgtgactaatacttcttactcgcccatctgcaacggatgggcgaatttatacccgctttctcgtctgctgtaatattccccactacacttccactgttgcgtcaggcgtttgtcgccatacgcttacagggtggcccgcatgcaaaaagcacaacggatcattaaaacctatcgtcgtaatcgaatgattgtttgtacgatttgcgcactcgttacgctcgctagcaccctgagcgtgcgatttattagtcagcgtaacttaaatcaacaacgggtagtacaattcgccaatcacgctgtagaggaattagataaagtactgcttcccctacaggcaggtagcgaagtcttgcttccgctgattggtctgccctgctctgtcgcccatttgccattacgtaaacaggcggcaaaactccaaactgtgcgatccattggcctggtgcaagacggcacactttattgctccagcatttttggttatcgcaatgtgcccgtcgtggacattctggctgaacttcctgcaccgcaaccacttttacgcctgacgatcgaccgtgccctgattaaaggcagtccggttttgattcaatggacgcctgcagcgggcagtagcaatgctggggtcatggagatgattaacatcgacttactgacggcaatgctgcttgagccacaactgccgcaaatcagtagcgccagcctgacggtggacaaacggcatttgctctatggtaatgggctggtagattcccttccgcaacctgaagacaatgaaaactatcaggtttctagccaacgctttccttttaccattaacgttaatggtccgggggctacggcgctggcatggcactatcttccaacacaattaccgctggcggtgctgctaagtttactggtgggctacatcgcctggctggcgaccgcttaccgaatgagcttttcccgcgaaatcaatctgggcctggcgcaacatgagttcgaattgttctgtcagcctttgcttaatgcgcgcagccagcaatgtattggtgtagagattttgctgcgctggaacaatccgcgtcagggctggattagtccggatgtgtttattcctatcgcggaagaacatcatttaattgtgccactgacccgctatgtgatggcagaaaccattcgtcagcgccatgttttcccgatgagtagtcagtttcatgttggcattaacgtcgcacccagccattttcgccgtggtgtgctgataaaagatctcaatcagtactggtttagcgctcacccgattcagcaactgatcctcgaaatcaccgaacgcgatgccttactggatgttgattatcggattgcccgcgagctgcatcgtaaaaacgtcaaactggcgattgatgacttcggcaccggcaacagcagcttttcctggcttgaaacattacgtcctgacgtgctgaaaattgataagagttttaccgcagctataggttctgacgcggttaacagcacggtgaccgatatcatcatcgcgctggggcaaagactgaatattgaactggtggcggagggcgtggaaacgcaagaacaggcgaagtatttgcgccgtcatggcgtgcatattttgcaagggtatttgtacgcacagccgatgccgctacgtgattttcccaaatggctggcgggcagccaaccgccgcccgcccggcataatggacatatcacgcccattatgccgttacgttaacgcttactcatcttcatcgtgcgccggttgctctttaacaatgcgaaccagatcaacacgataatcattggcttcaatgatggtgatatgcagtggccctacatcaatcacatcgcccacacggggaatgtgaccatttgcgctgatcacgaggcccgcgaccgtcgcgatatcatcgtcatcggcaaggtgctcaacatcaagcgcctgctgcaaggcatgcaaatctgtaccgccttttaccagccagccgtcaccatcagtaatgatttccggcgtttcgtcagcgtccgggaattcacccgcaatggcttccagcacatccagcggcgtgaccagaccttgtaccacaccaaactcgttggtcacgataacaaagctcccgcgagcacgacgcagcacgcccaacaggttgatcggatcgagggtttccgggacgataatcgccggagacgcgctagcaatcgccgccacatcaacgccctcttccagcgccaccagcagttctttagcacgtacaataccgatgatttcatccagttcaccgcgacataccgggaacagactgtgcggactagagagcagttgctcgcggatttcatcgaccccgagattagcgtcaacccagcttatttcaccgcgcggcgtcatgatcccgcgcagagaacggctcgccagcgtcagtacgccgttaatcatgtaacgttcttcttcggcaaatgcaccttccgggatcggcatcggcatcgggttatcggcatcgtgctgaacattggcctgacgtttcccgcccatcaaacgcaggatggcatcggcagtacgcgctcgcagcggcaaagtgctctggtggcgaataaagttgcgacgcgcaatctggttaaacacttcgatgatgatgctgaagccaatcgcggcatacaggtaacctttcggaatgtggaaaccgaaaccttctgccaccagactcagaccaatcattaacaggaagctcagacagagcaccaccaccgtggggtgctggttaacgaatcgcgtcagcggtttggatgccagcaacataaccgccatcgcaatcactaccgccgccatcatcaccggcagatggttaaccatccctactgcagtaattaccgcatccaagctgaagacggcgtcaaggatgacaatctgtgtgacgaccacccagaaactggcgtagcctttaccgtggccggaatcatgatcgcggttttccagccgttcatgcagttcggttgttgctttgaacagcaagaatatccccccgaacaacataatcaggtcgcgtccggagaaggagaaatccatgacggtaaatagcggtttggtcagcgtgaccatccaactaatcaggctcagcagccccagacgcataatcagcgccagacttaaccccagcaaacgcgctttatcgcgttgttttggcggcagtttgtcagcaagaatggcgatgaagaccaggttatcgatacccagcacaatttcgagaacaacaagcgtgagtagccccgcccaaatactggggtccattaagaattccatgacaagctcctgcttaaggaatagctattcgacgccagaaataatgcaggcgtaacgacaaaatgcaaacgaaaggtgcggcatagagtgccagaaaggcaggcgttaaaaggcctgatgctgaaatgacgtcggtgacgatccatactgcgggctactgccctatactccatggttgttaaacgggagttaaacatatcagagacgcctctgatttggcaaagatttaccttcctttgcaaacgaatgtgacaaggatattttacctttcgaaatttctgctaatcgaaagttaaattacggatcttcatcacataaaataattttttcgatatctaaaataaatcgcgaaacgcaggggtttttggttgtagcccttatctgaatcgattcgattgtggacgacgattcaaaaatacatctggcacgttgaggtgttaacgataataaaggaggtagcaagtgaccattgctattgttataggcacacatggttgggctgcagagcagttgcttaaaacggcagaaatgctgttaggcgagcaggaaaacgtcggctggatcgatttcgttccaggtgaaaatgccgaaacgctgattgaaaagtacaacgctcagttggcaaaactcgacaccactaaaggcgtgctgtttctcgttgatacatggggaggcagcccgttcaatgctgccagccgcattgtcgtcgacaaagagcattatgaagtcattgcaggcgttaacattccaatgctcgtggaaacgttaatggcccgtgatgatgacccaagctttgatgaactggtggcactggcagtagaaacaggccgtgaaggcgtgaaagcactgaaagccaaaccggttgaaaaagccgcgccagcacccgctgccgcagcaccaaaagcggctccaactccggcaaaaccaatggggccaaacgactacatggttattggccttgcgcgtatcgacgaccgtctgattcacggtcaggtcgccacccgctggaccaaagaaaccaatgtctcccgtattattgttgttagtgatgaagtggctgcggataccgttcgtaagacactgctcacccaggttgcacctccgggcgtaacagcacacgtagttgatgttgccaaaatgattcgcgtctacaacaacccgaaatatgctggcgaacgcgtaatgctgttatttaccaacccaacagatgtagagcgtctcgttgaaggcggcgtgaaaatcacctctgttaacgtcggtggtatggcattccgtcagggtaaaacccaggtgaataacgcggttagcgttgatgaaaaagatatcgaggcgttcaagaaactgaatgcgcgcggtattgagctggaagtccgtaaggtttccaccgatccgaaactgaaaatgatggatctgatcagcaaaatcgataagtaacgtattgtgttgattatcactcagttttcacacttaagtcttacgtaaacaggagaagtacaatggagattaccactcttcaaattgtgctggtatttatcgtagcctgtatcgcaggtatgggaagtatcctcgatgaatttcagtttcaccgtccgctaatcgcgtgtaccctggtgggtatcgttcttggggatatgaaaaccggtattattatcggtggtacgctggaaatgatcgcgctgggctggatgaacatcggtgctgcagttgcgcctgacgccgctctggcttctatcatttctaccattctggttatcgcaggtcatcagagcattggtgcaggtatcgcactggcaatccctctggccgctgcgggccaggtactgaccatcatcgttcgtactattaccgttgctttccagcacgctgcggataaggctgctgataacggcaacctgacagcgatttcctggatccacgtttcttctctgttcctgcaagcaatgcgtgtggctattccggccgtcatcgttgcgctgtctgttggtaccagcgaagtacagaacatgctgaatgcgattccggaagtggtgaccaatggtctgaatatcgccggtggcatgatcgtggtggttggttatgcgatggttatcaacatgatgcgtgctggctacctgatgccgttcttctacctcggcttcgtaaccgcagcattcaccaactttaacctggttgctctgggtgtgattggtactgttatggcagtgctctacatccaacttagcccgaaatacaaccgcgtagccggtgcgcctgctcaggcagctggtaacaacgatctcgataacgaactggactaacaggtgagcgaaatggttgatacaactcaaactaccaccgagaaaaaactcactcaaagtgatattcgtggcgtcttcctgcgttctaacctcttccagggtagttggaacttcgaacgtatgcaggcactgggtttctgcttctctatggtaccggcaattcgtcgcctctaccctgagaacaacgaagctcgtaaacaagctattcgccgtcacctggagttctttaacacccagccgttcgtggctgcgccgattctcggcgtaaccctggcgctggaagaacagcgtgctaatggcgcagagatcgacgacggtgctatcaacggtatcaaagtcggtttgatggggccactggctggtgtaggcgacccgatcttctggggaaccgtacgtccggtatttgcagcactgggtgccggtatcgcgatgagcggcagcctgttaggtccgctgctgttcttcatcctgtttaacctggtgcgtctggcaacccgttactacggcgtagcgtatggttactccaaaggtatcgatatcgttaaagatatgggtggtggcttcctgcaaaaactgacggaaggggcgtctatcctcggcctgtttgtcatgggggcattggttaacaagtggacacatgtcaacatcccgctggttgtctctcgcattactgaccagacgggcaaagaacacgttactactgtccagactattctggaccagttaatgccaggcctggtaccactgctgctgacctttgcttgtatgtggctactgcgcaaaaaagttaacccgctgtggatcatcgttggcttcttcgtcatcggtatcgctggttacgcttgcggcctgctgggactgtaagactgttgtacactaccggggccttttggccccgtttttttatctggaggattaatgacaatcacggacctggtactgattcttttcatcgccgcactcctggccttcgcgatctacgatcagttcatcatgccccgccgtaacggccccaccctgctggcaattcctttgctccggcgtggtcgcatcgatagcgttatcttcgtcggattgattgtcattcttatctataacaacgtcacgaatcatggtgcgttaataacgacatggttattaagcgcactggctctgatgggtttttatatattctggatccgcgttccgaagatcatctttaaacaaaaaggttttttcttcgccaatgtctggattgaatatagccgaatcaaagcgatgaacttgagcgaagatggcgtgttggtgatgcaattagaacagcgtcggctgttaatccgcgttcgaaatatcgacgatctggaaaaaatttataagcttctcgttagtactcaataagttatgaatttagccaaagctatgtttagtgtatttttaataatcagacatagcttaggctatattacctcttcccttatttgttatttattttaacgtttcattgatatataaatccaaatgaaaatcgttatcaataaagcaatgaaataatatattccaacagttgttttatattctcaaaatatgttaaggttgcgccctcatttggggagtagccgatttccagattccggaaatgtacgtgtcaacatactcgttgcaaaacgtggcacgtacggactgaatactttcagtcaggcgagaccatatgcacatcaatcgctatgcctgcatgaacgcgaaaaccatcacggcttgttgttcatgtatgcatgtttgctgggggcgatgatgtgttttatggataccccggtcaggacattgtcatgaatatcactgctactgttcttcttgcgtttggtatgagcatggatgcatttgctgcaagtatcggtaaaggtgccaccctccataaaccgaaattttctgaagcattgcgaaccggccttatttttggtgccgtcgaaaccctgacgccgctgatcggctggggaatgggcatgttagccagccggtttgtccttgaatggaaccactggattgcgtttgtgctgctgatattcctcggcgggcgaatgattattgagggttttcgtggcgcagatgatgaagatgaagagccgcgccgtcgacacggtttctggctactggtaaccaccgcgattgccaccagcctggatgccatggctgtgggtgttggtcttgctttcctgcaggtcaacattatcgcgaccgcattggccattggttgtgcaaccttgattatgagtacattagggatgatggttggtcgctttatcggcagtattattgggaaaaaagcggaaattctcggcgggctggtgctgatcggcatcggcgtccagatcctctggacgcacttccacggttaataagaacgctgccagaggtgaatattaaagtccgtctggcagtcgaacacttcttttgctgccagtgtttgccagacttctggcttcgcacgccaggcaaacggcgtcatctgcaataatgcgacggcttcatcaccgcgaagacgcatcggataacacaactccgcactctgctgtaatgtaaaaccttccagttgttctgcatgaggtgcatgaagatgtacttcattgtaaatcagccccttcagctccatcaaatgtcgcggtcccggcgtggcagtaatgacccagccgccgggcttcactactcgtgctaattcttctgctttacacggcgcgtaaatacgtattatggcgtccatactggtatcggaaaacggcaaacggtggctggaagcgacacaaaaagtgacctgcggatagcgtttcgccgccgcttttatcgctaccttgctaacatccagaccaaacgtggtgatttcgggcaacgcatcggcaaatgcgtgtgtgtaatacccttcaccacagccaatatccagcaccgccgtggccttatcatcaagccgttccctcagttgggcgacaattgcatcacgcagcggctgataatgtccggcatctaagaatgcgcggcgtgcttgcatcatttccgcgctgtcgcccggatcacgagaccgtttatgctgaacgggcagcagattgacatacccttctttcgccatatcaaactgatgtcgctggggacagatatagctgtttttttcacggctaagaggctgatggcaaagtggacaggaaaaagacatgacaactccggcaggatactaaaggccgcaagtgtaacgcgaatcacgcggcgggcaaatatccgaacgccaggagcgaagataaagcatagtaaaaagcctcgcattcgacgaggctttatagcgagattgaagcgtattcacacttcagatcagtggattcgatcagatagctgttacgttaacagctgccggacctttctggccgtcctgaatttcgaactcaacgttctgaccttcagccagagttttgaagccattaccctggatagcggagaagtgtacgaacacatctttgctgccatcagccggagtaatgaagccaaaacctttagactcgttgaaccacttaacctgacctttaatctttgccatttgaaaaattccttagattgttttcttcgcccgcaggcataacatagataaaacactcacattactgcaactggcaccaatataaggctcggcagagaagcggtattcaacgtcaacgtgtttactcaggacttctttactgaaaatgccacacataaacagaactgtacctcgtttaacccgaaatctgttatcacatacaacgttaattatggcaagccatttttaaacatgtctcgatcagacgcacaaatctcgatacgtcttccactttttttgcacacttatgcaacggaatacgcgccgatatatcattgtgcttaaccttgccagttcaggcagatacttaaactggcgtattttctaacatagttcaataagttcagttgttccaggccagtgggagaagttattacatagtgcgtgcaatatcacattttttgctatgcaatgaataaaaagttatatcactttttctcataaaacagtcagttaacggctattaattaccctaaagagaagtcaatccccaaagggattgtaaatttaaaataagaaaaattgatgaatgagcaaaaaaatcaagagagaaacgtttcgctaataaataataccacgcttaatcacaaatccgatgtaaacatcctaataaattaatggggtaaatatctttttctgatatcccgttacgcaaataaataatatgataattatttgaagtcagaccagagttttaatttgaagcagttgcaccatgacagtgcgtataatcaggatgaattgagtaacccttcaacgacggggttactcaagattgaggaaggattatcgttcggcgaccagacgaataatatcttcgtcttcaacgcttttttgactctcaacggtctttttatctgctttctctggttcgtttgcttcgcacaaacgacgtaacagtgcattttgacgtttttgctgatccagcaacgcctcaagcagttcaatctgttcgttagtccgactactggcacgattgataaaaaaccacaagatgagcccgataagaagaaccaccacgcttacaaccaaagacgcaatgttcatcacgccactatttacaacttcgttcatttcaccacctctgagtagaggcgctattctaccactgctggagaggaagaaaatctagtgctgaaaaaatgatatcaccacgggataaactggttaatggcacaaattccgctgaaaaattgtacatcctgatcgcacatcatgttgaatacctgcgcccaaagcagcaagcaagccaacaccacgacaaccagaacgacccatcgaaactttttcactccaatctccgtttcacctaccttatgtcattaaactagcatgcgttagttaaacagcgcctaactatgtcgatattcgtgctttttcggaatgagtcgcttgcttcagcgcatattgccgctacgattaagcgaacataaaaagagaagaggttgtaatgcgattcatcattcgcacagttatgctgatagcactggtatggataggattattactcagcggatatggcgttttgattggaagcaaagagaatgccgcaggattaggtttgcaatgtacctatctgactgccagaggcaccagcacggtacaatacttgcacactaaaagtggttttttggggataacagattgcccgctgttacgcaaaagcaatatcgtggtcgataatggttaagggcaataaataaccagattctcactcctgagtaaaatactcttatagcaagcgcgtttaatataacgccaccttcaactttatttttctcatgctaaataaagaacctgtctgtttgatattccgacaggttcttactctcatcagaacggatagtcgtgataacccatttgggcagaaattttgcgcgctgcggtatgcaacattgcgacatattcctgtaaacgctcttcagagaaacgcaacgtcgggaaggagatgctcaaaccggcaatgaccacgccaaagcgatcaaataccggtaccgcaatgcatcgcagcccttcttcctgctcttcattatcttcgccatacccctgctcgcgcacctggtccagaacgggtaataacgcttctgtactggtgatggtccgctcggtactgcgtttatactccacgccctcaagaatttgcttcacttcatcgcgatcgcgccatgccagcagtaccttaccaatcgcggtgctgtacagcggattacgacgcccaatccgactatacatgcgcaaattgtacatagagtcaattttgtgaatgtaaacaatactgtcttcgtccagtgcgccgaggtggatagtttctttggtcaggcgggagagctcacgcatctggatatctgcgctacgaattaaatcgacgttttgtaacgcgcgagcgcccagttcaaacaatttcagggtcagggaatatttctcgctctccccttcctgcgccacataacctaaggttttcatggtctgtaaaaagcgataaacggtgcttttactcatcatgacgcgctggctcagctcggttatccctatttcgcgctcttcacccagcgcctgcaaaatgccaaaaacttttagcacggaagatacagaatcaggctgtttatccagatctgcgttagccatttatcacctcattgcgagtgttttataaaaatcagaactgttttttattataatttcgcaccagggtggtcgcaatccatcttttgccggttagttacaattctgcgacatccaccgtgaatatcagtgctagaatcatacccctgttgattattcaccaaagatataaaattcctatgccaaaagttcaggccgacggcctgccattgccccagcgatacggtgcgatattaaccattgtgattggtattagcatggccgtccttgacggcgcaatcgccaacgtcgccctgccaacaatcgccacggaccttcatgccacgccagccagttccatctgggtagtgaacgcctatcaaatcgccattgtcatctccctgctcagctttagctttctgggcgatatgtttggctatcgacgtatttataaatgcggtctggtcgtttttctgttgtctagtctgttctgcgccctttctgatagcctgcaaatgctcacccttgcgcgtgtcatacaaggtttcggcggtgcagcgttgatgagcgttaataccgcacttatccgcctgatctatccacaacgttttctgggtagagggatgggcataaacagctttattgttgccgtctcttctgctgccgggccgacaattgctgcagcaatcctctccatcgcatcctggaaatggttatttttaatcaacgtaccgttaggtattatcgccctgcttctggcgatgcgttttctgccacccaatggttctcgcgccagtaaaccccgtttcgacctgcccagcgccgtgatgaacgcgttaaccttcggcctgcttatcactgcgttgagtggtttcgctcaggggcaaagcctgacgttaattgctgcggaactggtggtaatggttgttgttggtattttctttattcgccgccagctttctcttcccgtaccgctgctaccggtggatttactgcgtatcccgctgtttagtctttctatttgcacatctgtttgctctttctgcgcacaaatgctggcaatggtttccctgcccttttacctgcaaaccgtgctcgggcgtagtgaagtcgaaacaggtttacttctgacaccgtggccgttagcaacgatggtgatggctccgctggcaggctatttgattgaacgcgtacatgcaggattgctgggggctttagggttgttcatcatggctgcggggcttttttccctggttctgctgcccgcgagtcctgcggatatcaatattatctggccgatgatcttatgtggtgctggatttggcttattccagagtcccaataaccacaccattattacctccgcgcctcgcgaacgtagcggtggagccagtggcatgttaggaacggctcgtctactgggtcagagtagcggcgcggcgctggtggcgctgatgctaaatcagtttggagataatggtacacacgtcagcctgatggctgcggctattctggcagtgattgctgcctgtgtcagtggtttacgtatcactcagccacgatccagggcataaaaaaagcgcgtcgatcaggacgcgctttttagtatttacttcatattacttcaggtattcacccgtacgcagagcttcaattcgtttatccagcggcgggtgggtcatgaacaactcactgaggcttttgctcttaccgttaatgcagagagccatcatgctggttgcttcttgcggttcatagctggttttcaggcgctgcagcgcggcaatcattttctcgcgaccaaccagttttgcgctaccggcatcagcatggaattcacgatgacggctgaaccacatggtgataatgctcgccagaataccaaacaccagttccagaaccgttgcaaccgcaaagtagatcagcgggttgccgttgctctcttcaccttcatcacgatttccgcccataaaacccgcggcaagctgcgccagaatacgggaaataaagataacgaaggtgttcaccacgccctgaatcagcgtcatggtgaccatatcaccattggcgatgtggctgatttcgtgagcaattaccgcctcggcttcatccgggctcatgttctgcagcaaaccggtgctgacagcaaccagagaggcatcacggcgcgcaccggttgcaaaagcgttgatgtccggcgcatggtagatagccacttgcggcatagcgatccccgcctgacgagcctgggttgctacagtattgaccagccaacgttccctttcgttacgcggttgctcgatcacttccccgccaacagatcgtaatgccatccatttggacatcagaaggctaacgaaggaaccaccaaaaccgaacagcaaggccatgatcatcagcccctgaacgctgctgctctgtatccctgtcaggctcagtaccagcccgaaaacgaccattacggccaggttcgttagcaggaagagcgcgattcgcatcataattttctttttacctcagtttaacaaaacgcaatatgcgatacccacatcgtatgggttacgcgactattttcaagtctggatagtgcgtaagtcaccagaaagacacaactttacattttgtagcatctgatttacggcatcttgtcgctgttaaaaaatcaggcacaatttcttgtgcctgattgatattacttgacgggagcgggttgttccgcgggtctggctttttcaagcttcgccagatcgagtgcgatattcaccgtctcatccagataaggatccggctcctggtaatctttcggtagatcatccagtttcttcaactccggtttaccttcgcgtttaaagcgttcgttcaaacgcgccagacgcgtcgcatcatcttcattattctctttctcacgcacagcgtaattcagagaaacgatattgcgcttgtccttcatagcgttgaagcgcgcgatatccttcatgatgttctggaactcaggatctttcgcgatacgcgcattatgttccttcagcagctccggttcaaaggccgttaaatctccacttttcacataagtcgcggcatcaatgctatcccacggcagcgcgttatcttcgaatttctcacccgtttccgtttcttcattacccgtcggcatgatgatgtctggcgttacgcctttacgttgcgtactgccgccgttaacgcgatagaatttctggatcgtgtactgcacagaacccagcgctggccattcaggacgtaacatctgatcgtaaatacggttcaaactacggtattgctgaacggtgcctttaccaaacgtcggttcacccacaaccagcgcacgaccgtaatcctgcattgccgcggcaaagatttcactagcgctagcactgaagcggtcaaccagcaccaccagcgggcctttatagaaaacctgtccgtcggtatcgctatcttcacgaaccttgccgttgttatcgcggacctgaacaatgggacccgcaggaataaacagaccggagaggcttacggcttcagttaacgccccaccgccattgctacgcaggtcgatgatgacgctgctgacattctgtttttccagtttctgcagttgcactttgacatcgtctgtcaaacccacatagaagcccggaatatccagcacgccgactttctctttaccgacggtcttcacgctcattttaaccgcgcggtcttcgagacgaatacgttcacgggtcaacgttacagtacgggtcttggtccctttaccagcaggtaaaatttccagacgaactttactgcccttcggccctttaattaaggcaaccacatcatcaagacgccagccaatcacgtcaaccatcggcttgcctgtttgaccaacaccgacaattttgtcaccaacgctgatagctttactcttcgctgccggaccacctgccaccatgctattgataacggtgtagtcatcatccatttgcagcactgcgccaataccttccaggctcaaactcatttcagtgttgaactgttcggtattacgcggggaaagatagttggtatgcgggtcgatttcacgcgcaaacgccgtcattgccaggctgaaaacatcttcgctgttggtttgcgccagacgacgaatggcaaatttgtagcggcgagtcagggtttcacgaatttctttatccgtttttcctgtcagcttcaggcttaactcgtcgaatttgactttactgtcccacagcgcgttcaactcagcctcgtttttcggccagggcgctttgctgcggtcaaggttataagtgtcgttgccggtgaaatccatcggcttttccagtacgctcaaagcgtactggtaacgctcaaaacggcgcttttgcgccagattgtagagatcgtagaaaacgtcgagtttgccactacgcagttcatcgcctaactcggttttctttttcgcgaactgttcaacatcgcttgccagcagcacgttgtggctgtaatcgagcagattcaggtagcggtcaaagattttggcgctaaatgcctgatcgaggtcgaactggcgataatgagaacgggtgaagcggctcgttacgcgctcacttaccgtcgcatgctgcgtctcttcctttaataccggaatttgatcagcacgcgtgatatcttctacagcgaaggtctggcctgctattgcaagcaggccagctaacgcggtaagcctaaaaaacatgttcatgcctggcccggcctccgtttcagaacaccaggtgttctgcgcgcacaatcaaagacataccgctattcagctggacgcggacgccgtctttggtgatttctaatacggtggcatccatcgcgttttgacccgctttcaccttcagggcttgtccgacagtcagagcactaatgtcagaaaccggggtgtgctgttcttcgcgaggtgcttttactgtttttggcgctttctctaccggcttttgcgcacgaggtttacgttcagcgccttctttgcggcgtggcgtagtcggacgtggcttgcgttcgcggcgcggtgcgtcttctttctcaccagcagttgcggcagcttcgcgttttttcgcttgctgttcagcacgctgtgcctgaacacgcgctttcgcttcttcaagctgcttgcgagcatgctctacatgttgctcgtccagctcaccgcatgggttgccgtcaagatcgacacgcgttgcgccgggtttaacaccgtaaagataacgccagctgctagtgtagagacgtaaagcggatcgcaattgcgttttgctcaggttcatttccccagcaacacgatcgaccaaatcctgaaaaataccgattttcagcggacgcgcttcaccttccgcactgaaacagtggggaaaacgttcggccagaaacgcgattacttctttactgctattcaacttaggttgattttccatgaaatttcctgattacaacggacgtagccaacaagcgcaggcatgaacaggcgtcattataatgacgctatcagtaaatgctacgttatccgttgattatcctgcgacgctcgcaaagaattttttgtaatccgtcgttgcaagcactttttcaagctgtgccacaagctgacgtaagccttgctcgtcctcgtctgtaaagcgaccgaagacggtactatcgatgtcgagaacaccaataatctgatttttcaccaccagcggcagaacaatttcagaattactcgccgcatcacaggcaatatgcccgtcaaacacatgaacatcctcgatacgctgcacttgattgcgggcaaccgcagtgccgcacacgccgcgcccgacgggtatccggacacaggcaattttgccctgaaatggtccgagtaccagtgtatcgtcctcaagcaaataaaaacctgcccagtttatgtcagtgagacgctcatataacaacgcactggtgttcgcaagcgttgccagaaaactggtttctcccgccatcagcgcgttaaagtcgcgatttaaatccgcgtaaaattctgttttgttcattatataatcacttggttgtcttacctggatctgccagcctattaaaataagcattaaatgcgttaatgctcaagatcattcccatcatgggttaagattaatgttaattcttattacatttggcacgtcatggctcttaacacaccacaaattacgccgacaaaaaagataacagtgagggcaatcggcgaggaactgccgcgtggtgattaccaacgttgcccgcaatgtgacatgctgtttagcctgcccgagataaattctcatcaaagtgcctattgtccgcgctgtcaggcaaaaattcgtgacgggcgcgactggagcctaacgcgcctggcggcaatggccttcaccatgctgttgcttatgccgtttgcctggggcgaaccgctgttgcatatctggctgttaggcattcgtattgacgccaacgttatgcaaggcatctggcaaatgaccaaacagggcgatgcgataacggggagcatggtctttttctgcgttattggtgccccgctcattctggtgacctccatagcttatttatggtttggtaaccgactgggaatgaatttacgtccggtactgctgatgcttgagcgacttaaagagtgggtaatgctcgatatctacctggtcggcattggcgttgcttctataaaggtacaggattatgcccatatccaggctggtgtcggcttgttctcttttgtggcgttggtgattttaacgacggtgacgttgagtcatcttaatgtcgaagaactgtgggagcgattttatccgcagcgccccgctacgcgtagggacgagaaacttcgtgtctgtcttgggtgccattttaccggctatccagatcagcgtggtcgctgcccgcgttgccatatcccgctacgcctgcgtcgccgtcatagtctgcaaaaatgctgggcggcgctgttagcgagtatcgttttattgttacctgccaacctgttgcctatttctatcatttatctgaacggaggacggcaggaagatacaattctttccggaattatgagcctggcaagtagcaacattgcggttgcaggaatcgtgtttatcgccagtattctggtaccgtttactaaagtgatcgtcatgttcactttactgttgagcattcattttaaatgccagcaaggtttacgcacacgcattctgttactgcggatggtgacctggattggtcgctggagcatgctcgacctgtttgtcatatctttaaccatgagcctgattaatcgcgatcagatcctcgcttttactatgggaccggctgcgttttatttcggcgcagcggtaattttgactattcttgctgtggaatggctggacagccgcttactttgggatgcacatgagagtggaaacgcccgcttcgacgactgaataaccgcttactttgggatgcacatgagtcaggaaacgcccgctagcacgactgaagcgcagattaaaaataaacgccgtatcagtcctttctggctgctgccgttcatcgcgctaatgattgccagttggctgatttgggacagttatcaggaccggggtaataccgtcaccatcgactttatgagcgcggatggtattgttccaggccgtacgcctgttcgttatcagggcgttgaagtcggaacagtgcaggatatcagcctcagcgacgatcttcgtaagattgaagtcaaggtcagcatcaagtccgatatgaaagatgcgctgcgcgaagagactcagttctggctggtgacgccaaaagcaagcttggcaggtgtctccgggctggacgccctcgtcggtgggaactatatcggcatgatgccgggtaaaggtaaagagcaggatcactttgtcgcactcgatacccaaccgaaatatcggctggacaatggcgatctgatgatccacctgcaagcccccgatctcggtagcctgaacagcggtagtttggtctatttccgcaagatcccggtgggaaaagtctacgactatgccatcaatcccaacaagcaaggcgtggtgattgatgtcctgatcgagcggcgttttaccgatctggtgaaaaaaggtagccgtttctggaacgtttccggcgttgatgccaacgtcagtatcagtggcgcgaaggtgaaactggaaagcctggcggcactggttaacggtgcgattgccttcgatagtccagaagagagcaaacctgccgaggcggaagatacctttggtctgtatgaagatctggcccacagccagcgtggcgtaataataaaactggaactgccgagtggggccggattaaccgccgacagcacgccgttaatgtatcaggggctggaagtcggacagctgactaaactggatttaaatcctggtggtaaagtcacaggggaaatgaccgttgatcccagcgtcgttaccctgcttcgtgaaaatacccgcatcgaattacgcaacccgaaattatcccttagcgatgctaatctcagcgccctgctgaccggcaaaaccttcgagctggtgcccggcgatggcgagccacgcaaagagttcgttgttgtgccaggcgaaaaagcactgctgcatgaacctgatgttctgacgctgaccctgaccgcgccggaaagttacggtattgatgcgggtcagccgctcattcttcacggcgtgcaggtaggccaggttatcgatcgtaaactcaccagcaaaggcgtcacctttaccgtcgccatcgagcctcagcatcgcgaactggtaaaaggcgatagcaaatttgtcgtcaacagccgtgtcgatgtgaaggtggggctggatggcgttgagtttctcggtgccagcgccagtgaatggatcaatggcgggatacgtattctgccgggcgataaaggtgagatgaaagccagctatccactgtatgccaatttggaaaaagcgctggagaacagccttagcgatttacccaccacaaccgtgagtttgagtgcagagacgctgccggatgtgcaggcaggaagcgtagtgctgtaccgtaaatttgaagttggtgaagtgattaccgtgcgtccgcgagctaacgcgtttgatatcgatctgcatattaagccggagtatcgcaaccttctgaccagcaatagcgtgttctgggcagaaggcggggcgaaagttcagctgaatggtagtggtctgaccgtacaggcatccccgctctccagagcattaaagggagccattagcttcgacaacctcagcggtgccagcgccagtcagcgtaaaggcgataagcgtattctgtatgcttccgaaacagcggcccgtgcggttggcgggcagattacgcttcacgctttcgatgccggaaaactggcggtcgggatgccaattcgctatctcggtattgatatcgggcaaatccagacgctggatctgattaccgcacgcaatgaagtacaggcaaaggcggtactttacccggaatatgtccagacctttgctcgcggtggtacgcgcttcagtgtggtcacaccgcaaattagcgcagctggcgttgagcatcttgatactatcctccagccgtatatcaacgtcgaaccaggccggggcaatcctcgccgcgactttgaattacaagaggccaccattactgatagccgttacctggatggcttaagcattattgttgaagcgccggaagccggtagcttaggcatcggtacgcctgtgctgttccgtggtctggaagtcggtacggttacaggaatgacgctggggacattgagtgatcgcgtgatgattgcgatgcgcatcagtaaacgctatcaacacctggtgcgtaacaattccgtcttctggttggcaagcggttacagtctggactttggtctgacgggcggcgtagtgaaaaccggcacctttaaccagtttatccgtggcggcatcgccttcgccacgcctccgggtacgccactggcaccgaaagcccaggaaggcaaacacttcctgttgcaggaaagtgaaccgaaagagtggcgtgaatggggaactgcgcttcccaaataatgcccactgctccggcgtgcctgcgccggagcgtttatgctaaactgcgcgcctgtttttttgccagtggtacatgctcgtggcccaacacaccgtttatttcccggacgcctttctgacacaaatgcgcgaagcgatgcctagcacgctcagttttgatgattttcttgccgcctgtcagcgcccgttgcgccgcagcattcgcgttaatacgctgaaaatctccgttgctgatttcctgcaattaaccgctccttatggctggacgcttacgccaattccgtggtgtgaagaaggtttctggattgaacgcgacaatgaagatgcattgccattgggtagtaccgccgagcatttaagtggcctgttttatattcaggaagccagtagtatgttgcctgttgccgccttgtttgctgacggtaatgcaccacagcgggtgatggatgtcgctgccgcgcctggctccaaaacgacgcaaatttccgcgcggatgaataacgaaggggcaatccttgccaatgagttttccgccagtcgggtaaaagtgttacatgccaatatcagccgctgtggtatcagtaatgttgcgctcacacattttgatggccgcgtgtttggtgcggcagtgccagaaatgttcgatgccattttgctggacgctccctgctctggcgaaggcgtggtgcgtaaagatcccgatgcgctaaaaaactggagtccagaaagcaatcaggaaatcgcagctacacaacgggagcttatcgacagcgcctttcatgcattacgtcctggtggtacgctggtttacagcacctgtaccttaaaccaggaagaaaacgaagccgtttgcctgtggctgaaagagacttaccccgacgcagtagagtttttaccacttggcgatctcttccctggtgcaaacaaagcgctgaccgaagaaggctttttgcatgttttcccacaaatttacgactgcgaaggcttcttcgttgctcgtctgcgtaaaactcaggcgattcccgccttacccgcccccaaatacaaagtcggtaattttccgttcagcccggtgaaagatcgcgaagctggacaaattcgtcaggcggctacaggtgttggcttaaactgggatgaaaacctgcgcctctggcagcgtgacaaagaactgtggttgttcccggtgggcattgaagccctgatcggtaaagtccgattttctcggttggggattaaacttgccgagacgcacaacaaaggttatcgctggcagcatgaagcggttattgctcttgccagtcccgataatatgaatgcattcgagctgacaccgcaggaagcggaggagtggtatcgcgggcgcgatgtttacccgcaagccgcgccagtggcggatgatgtattggttactttccagcatcaaccgattggtttagccaaacggattggtagccgattgaaaaacagctatccgcgtgaactggtgcgcgatgggaaactttttaccggtaacgcctgacagcgcacaaaaaaagcgcactttttgactggcacattcggctgcctcaactaggctgaaaaatggtgcgatcggactggtcgtaccacaatcggcagctaaatggagagcacgaagatgaaaaccagtgtgcgcataggcgcttttgaaatcgacgacggcgaattacacggtgaaagcccaggtgatcgaacgttaaccattccttgtaaatctgaccccgatttatgtatgcaactggatgcctgggatgctgaaaccagtatccctgccctgctaaatggcgaacactctgtcctttaccgtacccgttacgatcaacaatctgatgcctggattatgcgtcttgcctgatccaaaaagaacccgtcggcatggcgggttatttgtcctggttattcccccgttgtaaaatctctcctaaacttaacggtacggcaccacacttcggggatgaaatgttcgcgctggtactttttgtttgctacctggatggcggttgtgaagatattgttgtggatgtctacaacacggaacagcagtgtctttattctatgagcgatcaacggatccgccagggcggttgttttccgattgaggattttatagatggtttctggcgacctgcacaggagtacggtgatttttaattattgcaattgcacaagagtcagttcgcccccaaagacagcaccggtatcaatataatgcaggttgccaatatccacgcgatgtcgcaacggtgtatgaccaaaccagaaatgatcagcacctgtaattccctgccctttttggcgttcacctaatcggctgcggctccacaagacctgatgcaaatcaacgtccttttgccattcataaacatcatctggataatcggcatgagcaataatatgcttgccggtgcgactgtgtacttcaagaataaagggcaaatgctgacatttttccagcgccgttttcgcttgtttctgttgattatctgccagcgcaataaaccagtcgccgccattcatcaaccacaaagacatctgctgggatgccagcgcatccatcgccatctgttcatgattgcctcttaccgcacaaacccaatgttgttccagtaactgcagacaacgtaaactttgcggcccacgatcgataacgtctcccacactgataagtaaatctcgccacggatcaaaacgacaatgccataatttgcggcgcaactgctcaagacaaccgtgtatatcgccagaaagccagatatgtcgccattgatgacccgcaattctctgataaacgggcgcaggctgtttcatcaatattttcctcccgcgctaaagatcacataatcttaacaagaatgttaaaaaacgctggactcagacagtagagtgtgtgttatggttgactataaagtcagcgaaggaaatgcttctggcttttaacagataaaaagagaccgaacacgattcctgtattcggtccagggaaatggctcttgggagagagccgtgcgctaaaagttggcattaatgcaggcttagttgccttgccctttaagaatagatgacgacgccaggttttccagtttgcgtgcaaaatggtcaataaaaagcgtggtggtcatcagctgaaatgttaaaaaccgcccgttctggtgaaagaactgaggcggtttttttattggaaatcaaaaggctattttaggtaattaacagagtttttcagctcgttctataaacggtgccagactcattttttcgccgggattgttaggatcatcaatctgaatcacgctaatgggttgggcattggtcttcccactggcaacttccttttgtgcgatatcgtttaaaggatactgcacgagggtactcggattaataacatacaaagcattacccggtcggcaagtcagcatcacctcttcgcgattaaacgcccatttgtctttacccacttcaaaacgactgacggtaatcacctgcggtgcagccagcgccgctgcagaactggtgagtaacagaaacgccagaatactttttttcatcattttcgtaatccatcaaaaaggttcgagagtcgcaagcaggctgatgatcaccagcactaccgcacctatcgcccattcgagtttagtcatccacacaaaccagggtgccgcacgatcttcatcctgcctcatgcgcggtacaagaacataacgattagccagcgcaatgaccaccataatcatcaccaggatggctttgagcaataagagttggccccagtaagtcgtaagcgtggggggaaatccggtaatcaacaatgcattaagcacgccgcttgccagtacgccgatcaccgcaaaatgcccgcaccaggaaaaacgcatcagcgcctgaatagcctggtgtcgccaacggcctttgatgagttgcatacaccagagcaccggcagtaatcccccaaaccacgccgccgcacaaatcaggtgaatcgcgtgattagtctgatggattttcgctgttaccccttcattcagcgtcgcatgccccactcccgccagcagaataaattgcgcggtagtgagcataaacagcaaacgtggcatattccgcggttgcataagggcgacgatcaacgttacgagggcgagaacaatttgccataaccagatgccaccaaactgcgtttgcaaaacagcctgccaaatgtttgggctaaatacatctgtccatcccgttcccatcaacccgccctgaacggcgagcattgcagtggcactgatcaaactccagacggcagcgtgctgttgtaaacgcagaaaacgcttcgccagcaagcgacgaatcgtcaagggggccagccaggcaccgtacattgcgaagccaaaaaccagcatcaggctggtgaaatggataaatcgcagcgcgatccaggtaaacgccagcatgatttatttcacgctaaaggtgtagtgtcctttcgttttatgcccgtccacgctaacaacatgccagtcaacggtgtaggttccgggtttcaggctatcggccagtggaacaatcagttgcttttggtcctgctcatttcgcttcgccggtaatgttttaatattttcgttttttggccccgtgatttttgcaccactgaatcctgtttcaacaccttcgctgaagtttaaagtgattgcctgcggtgcagctgtcacttgcgcgtttgccgcaggatactgatgcgttaaatgcgcatgtgcccagacggaaggtgtcaccaagctagtggtcaggattgccagcgcgtagcgaagggagcgtgcagtactagccatattatctattcctttttgtaataacttttttacagagcataaccttgtctaatgtctgagtcgaggatcatcaattccggcttgccatcctggctcactcttagtaacttttgcccgcgaatgatgaggagattaagaatgctgaagaatctggctaaactggatcaaacagaaatggataaagtgaatgtcgatttggcggcggccggggtggcatttaaagaacgctacaatatgccggtgatcgctgaagcggttgaacgtgaacagcctgaacatttgcgcagctggtttcgcgagcggcttattgcccaccgtttggctagcgtcaatctgagtcgtttaccttacgagcccaaacttaaataaaacttatacagagttacactttcttacataacgcctgctaaattatgagtattttctaaaccgcactcataatttgcagtcattttgaaaaggaagtcattatgagcttctggaaagttgcagcagcgcaatatgagcctcgtaaaaccagtctcaccgaacaggtagctcatcatctggagtttgtgagggccgccgccaggcaacaatgtcagctgttagtttttccaagcctttctttactggggtgtgattatagccgacgtgcccttcctgccccacccgatctcagtctgttagacccgctttgttatgccgcaacgacctggcgaatgaccatcattgccggccttcccgttgaatataacgatcgctttattcgtggaattgcggtgttcgcaccgtggcgaaaaacgcctgggatctaccatcagagtcatggtgcatgtctgggccgtcgttccagaaccatcacggtggtcgatgaacaaccgcaaggtatggatatggacccgacctgtagtctgtttactacagggcaatgtctgggagaacccgacctgctggcgagcgcccgtcgcttacaattttttagtcatcagtacagcattgccgtgctgatggcaaatgcccgtggtaacagtgcactatgggatgaatatggtcgtctcatcgttcgcgccgatcgtggtagtttattgttagtcggtcagcgtagtagtcagggttggcaaggcgatatcattccattacgctaagctttttcggcctggagcatgccatgttgcgcattatcgatacagaaacctgcggtttgcagggagggatcgttgagattgcctctgttgatgtcattgacggaaaaatcgtcaaccccatgagccacctggtgcgccccgatcgtcctattagtccacaagcgatggcgattcatcgcatcaccgaagccatggtcgccgataaaccgtggattgaagatgtgatcccacactattacggtagtgaatggtatgtcgcgcataacgccagctttgaccgccgcgtactgcctgagatgcccggtgagtggatttgcactatgaaactggcccgtcgtttgtggcctgggatcaagtacagcaatatggcgttatataaaacacgcaagctcaatgtacagacgccgccgggcctgcatcatcaccgcgcgttgtatgactgttatatcaccgccgcgttgcttatcgatattatgaacacctccggctggacggcagaacagatggccgatatcaccggacgtccgagcttgatgacgaccttcacctttggcaaataccgtggcaaagcggtttccgacgttgccgaacgcgatccgggctatctgcgctggttatttaataacctggacagcatgagcccggagctgcgtttaacactgaaacattatctggaaaatacttaatccgcaggcgtagcgggtaatgttccctgcgccagcgcgaccagaaaagcatattccatcgctacgccttcgtagcttttaaagcgaccagatttaccgccatggccactgtccatgtcggtacagagcaataaaagatggtcatcggttttcagctcgcgcaatttagcgacccattttgccggttcccaatattgcacctgagaatcgtgcaaaccggtcgttaccagtaaatgcggataagcctgtgcggtgacgttgtcatacgggctgtagcttttcatgtactcgtaatattgcggatcctgcgggttaccccactcttcaaactcaccagtggtaagaggaatactttcatcaagcatcgttgttacaacatcaacaaacggtacctgggcgataacgccgtggaataattccgggcgttgattaattgcaacgcccatcaacatgccccccgcactcccgcccatcgcataacaaaggctaggagagccatagcccagttttaacaatgcatcgcaggcatcaagataatcattaaacgtatttttcttcttcagaaattttccgtcttcgtaccattgttgccccagctcaccaccgccgcgaacatggacaatggcgtagacaaagccacgatctaacaaactcaagcggctaaaactgaaatcggcatcaatacttgcgccgtaagaaccatagccatacaccagcaacgggttgtgtcctttgcgaaaatgtttgcgatggtagaccaagctaaccggaacttcgacgccatcacgggcgactatccacaggtgttcactgcggtaattcgccgcataaaaaccaggaacttccgtttgttttaatacacgacgctcaccggtatccatatccagttcaaacaaagtgtctggtgtagtcatggaagaataaccataacgcaatcgcgcggtttcaggttctggattgtaggcaatccaggtcacataggccggatcatcaaaggcaataccaatgacttcccgggtcttgcggttaatttggcgcaaactggttaacccgcgctgacgctcttcaaccaccagccagtcggtaaacagcgtaaacccttccagcatgatgttttcgcgtggcggaattaactcttcccactgttgctcatcacgcatacgggtacggtataagccaaagtttttgccgtggcggttggaacgcagataaaaacgatgctggtagtgatcaaggctgtattcgtgatctttgcggcgcggcagaaaaacaaacggctcggcatcggccatttccgcgtccagcaggcgaacttcactggtggtggcgctggccaaatgaatgactacatagtgcttgctggtcgttttatgcaggctgacgtaataggtatcgtctttttcttcgtagatcagtttatcttggcttgctggcgtaccgatggcgtgacgccagacctgataaggcagcagcgtcaccggatgcttgcgaacatagtagaaaatccaggagtcatttgcccagacaaagctgggttcaacgttatccagcagttccgggtaccagttaccagtttccagattacgaaaacgaatgccgtactggcgtcgggaaagaaaatcttctgccagcgccataatggtgttatcgggcgtaatcgccattccgcccatgctataaaactcactatgagctgcgcgcttattggcatcgagcaatgtttcccactcatcccactcttcactgaatgcgctttgacgctggtagatagcatattcacagcctggttcataaatatgccgatagcggtagccatttttgatgtagggcgcagaaacttctcgttgcggaatgcggtcgatgatttcctttaagatgcgatcctgcaaggcttgttgactggccatcacccgatgaccgtaactattttcttgttgcaggtagtccaggacttctggctgagaacgcgtatcgtcccgcagccagtagtaattatcgatgcgcgtatcgccatgaagcgtcatggcgtggggaatgcgggcggcttttggtagcatgttattgttctttctggttgaaacatcttataagggtggcaaaactcaccggggatgcaagcgaaacaggggagtcattgcttagatgatgacaggtaatggcgcggatatcgaatgttatgcagacagagaaaatcagcctgttcaaatggctgtgcgattctggatagcccgaaatagtcaacttcaggctatccagagagcggaattattccgccaaagtgcgtttttgctgttcgagatcgcgttcaatgccgtcacgaacatcctgggggattttcagcgcgtcacccagtgcattcaggtaactgcgttccataaaatggtcaatatcaatagccgcgcaactcaggaaatagatttccagcgcctcttcttcattgcggaccccggtagccaggcgttgtggatccagcggttgttcgattgcctgctcaatgagtacacgcccctgctcttccacgccggctccacgcaattgctggtcgattgccgcacgttctttggcatcaatatgaccatcacttttagcggcaaagaccagcgcaaggatcaaacgtgctgtacgctcatccagcggcgtactttgcgcgccaaactgcggttcgtcctgatgcgccgcgcgaattttatctttgtatttattccacagcaccgtacccgctaccgctccgccgccaaccagtaacgcgttggtgccatatttcgtaagaagtttacgtgcacttttatttgcgaccagcagcccagccagtccgcctaatgcgcctggcactaacagtttgaccaatccctgatccgcagagctggaggtagaagaactgctttgcccaagcagggattgcagttgatttaaccagttagccatatttgctcctcaataaccatttttagtgcctgtagcatagcggatgaggatgtcagaaaatgtatatcgagacaaaagatgcgcaaataagcggggcggtaggccgttattcaaagaaattcgcgccaggtaaggtatttactgtatatcaggtgataagggtattttaggtgaaagtagtttgtcgttttgagtggcattgtttgatgctgattgcccgatgcgacgctgttgcgtcttctcaggcctacgattgtggtgcgttctggggcggacaaggcactcgcgccgcatccgccaacagtcaatcgaattatcagaagccattaacgccgctgatattccgccattcccgctttgcagtccacgctgacctggtaatgaatatcggcacttttaccacgcacggttagcggtacactccatttatcatctttaccctgaatgtcctgcaaactgacccaagccacgggatcggcctgaccgacaattttttgatcatctgcccaacgcgccacgcgattttgttgataatcacgttttacgctcgcggcaattccggcagcatccagatcttcacactttgggaaagtgacgctcttgctggtttcattattggcagcgaaaacacttgcgcaggcagaaaccaacaacagccctaaaaacgcccctctttttttcatgtttttctccatagcacaatgattcaggagaaagcatggtacaaattgtcaggagcgcaagttgcttcaggccgcgtgactggcatcttcctcttcggattcagcaccgacgacctgtggggacggtaatttgccggttttcagaatggtgctcagcacatctttttgttctgccagccataggctaagggcttcacgttgctcgtcttccatttgcactggagaatttgtcagccaggtgtcaagcagatccgccgtatcaagcattttgtcataagcatcggcttcctttttgctggtaaagctcattttctcttcgccctcacgaatgactacgtatttaacttcaaccgccatttgcagcctctcataataactgtgattttatacagtatatttcttttcggttgagaaatcaacatcagcaataaagacacacgcaaacgttttcgtttatactgcgcgcggaattaatcaggggatattcgttatgacgttattaggcactgcgctgcgtccggcagcaactcgcgtgatgttattaggctccggtgaactgggtaaagaagtggcaatcgagtgtcagcgtctcggcgtagaggtgattgccgtcgatcgctatgccgacgcaccagccatgcatgtcgcgcatcgctcccatgtcattaatatgcttgatggtgatgcattacgccgtgtggttgaactggaaaaaccacattatatcgtgccggagatcgaagctattgccaccgatatgctgatccaacttgaagaggaaggactgaatgttgtcccctgcgctcgcgcaacgaaattaacgatgaatcgcgagggtatccgtcgcctggcggcagaagagctgcagctgcccacttccacttatcgttttgccgatagcgaaagccttttccgcgaggcggttgctgacattggctatccctgcattgtaaaaccggtgatgagctcttccggcaaggggcagacgtttattcgttctgcagagcaacttgctcaggcatggaagtacgctcagcaaggcggtcgcgccggagcgggccgcgtaattgttgaaggcgtcgttaagtttgacttcgaaattaccctgctaaccgtcagcgcggtggatggcgtccatttctgtgcaccagtaggtcatcgccaggaagatggcgactaccgtgaatcctggcaaccacagcaaatgagcccgcttgcccttgaacgtgcgcaggagattgcccgtaaagtggtgctggcactgggcggttatgggttgtttggtgtcgagctatttgtctgtggtgatgaggtgattttcagtgaggtctcccctcgtccacatgataccgggatggtgacgttaatttctcaagatctcagtgagtttgccctgcatgtacgtgccttcctcggacttccggttggcgggatccgtcagtatggtcctgcagcttctgccgttattctgccacaactgaccagtcagaatgtcacgtttgataatgtgcagaatgccgtaggcgcagatttgcagattcgtttatttggtaagccggaaattgatggcagccgtcgtctgggggtggcactggctactgcagagagtgttgttgacgccattgaacgcgcgaagcacgccgccggacaggtaaaagtacagggttaaacccggcaaaaaaacgctacaaaaatgcccgatcctcgatcgggcattttgacttttacagcttagcgccttctacagcttcacgcgccagcttagtaatgcggtcgtaatcgcccgcttccagcgcatctgccggaaccagccaggaaccaccgatgcacagcacgcttttcagcgccaggtagtcacggtagttagccggagaaataccacccgtcgggcagaaacggacctgggagaacggacccgcgatcgcctgcagggctttcacgccgccgttagcttcagccgggaagaatttgaactctttcaaaccgtagtccatacccagcatcagttcggaaacagtgctgatccccggaatcagaggaatagtcccttcggtagcagctttcagcagcggctcggtcagacccgggctaattgcgaactgtgcacccgcttcagtgacttctgccagctgctgtggattcagcaccgtaccggcacccacaatcgcttcaggcacttctttggcgatagcacggatagcgtcaactgcacactcggtacgcagagtcacttccagaacgcgcaccccaccagcaaccaacgcttttgccatcggcaccgcgtgttccagtttttttaccacgataaccggtacaaccgggccggtggtcaggatactttctgcacttgttttccagtttttcatcagagttttctctcgcctgattacaaatttgtcgtcttaaaaagtgatacaggttgcgccctgttcggcaccggacagtttttcacgcaaggcgctgaataattcacgtcctgttcccacgcgactcgcgctcaggtcaggaatgtgcggttcgcgagcagccagttccgcttcgtctaccagcagcgtcagttcgcctgtctgtccattcacacgaatgatgtccccgtcgcgcacttttgccagcagcccgccatcgtaggcttctggtgttacgtggatagcactcggcactttaccactagcgccggagagtcgtccatcggtaactaacgcaattttgaaacaccggtccaataatacaccaagtggcggcatgagtttatgtaattctggcattccgttcgcttttggcccctgatgacggacaacaacgacacaatcgcggtccagcaaacccgcttcaaaggccggcataacgtcatgctggctttcaaaaacaaccgctggcgcttcaatcacctggttctcaaccggcacggcagaggttttcataaccgcacggcccaggttaccgcttaacacttttgtcccaccatgatgagagaaaggttgttcgaaggaagcgatcacattgctgtcgagacttttttccgccccttcccgccagtccagttcaccattattcagccatggttcaagggtataacgagacagaccaaaacctgccaccgtattgacatcttcatgcagcaggcctgctttgagcagttcacgcaccagaaccggtacgccacctgccgcctggaagtggttaatatcggccggaccgttcgggtagagacgtgccatcagcggtacaacatcagaaaggtcagagaagtcatcccagttaatctgaataccggccgcgcgcgccatcgccaccaggtgcatggtgtggttagtggaaccaccggtcgccagcagtgcaacgataccgttcaccaccactttctcatcgatcatcttaccgatcggcatccattcattaccattaccggtcatgcgtgtaacctgacgcgcagctgcggcggtcaaagcatcgcgcagcggagaatccggatgaacaaaagaagagcctggcaactgcatccccataaactccaccaccatctggttggtgttggcagtaccgtagaaagtacatgttcccggcgcatggtaagacgcggcttcactctccagtaaggccatgcggtccactttaccttcggcataaagctggcgaatacgcactttttctttatttggcaaaccgcttgccatcggtccagacggcacaaacaccgcaggcaaatgaccaaagctcagggctgccatcgtcagacccgggacaatcttgtcgcacacaccgaggaacagagcaccatcaaacatgttatgggacagccccaccgccgcagacatcgctatcacttcgcggcttagcaggctcaattccattccatcctgcccctgggtgacaccatcacacatcgccggaacaccgcccgcaacctgaccaaccgcattcgcttcatgcagggctttacgaatgatttctggatagtgttcataaggctggtgcgcggagagcatgtcgttataggaggtgatgatggcgatattgttacgcaacatgcttttcaaagaggctttgtcttctggctggcaggcagcgaaaccgtgtgccaggttaccgcatgccaactggctacgatgaacggtgctagttttcgcttgttctatccgggcgagataagcagagcgagtctcgcggctacgttcaatgattcgatttgttacgcgtaacaattgtggattcataaaggctcctgaaattgagttgtcagagcaggatgattcacaacgcgtttcattcagaggatttatgactgaaacgcctgtaaccggagctcatagggcaaaaacgtttcagtcagtgtaataaaaaaagcctcgtgggtgaatccgcacgaggcctgaaagtgtaaaaattgttctacaatctgcgcaagatcatgttaccggtaaaataaccataaaggataagcgcagatattactcaaactcattccaggaacgaccatcacgggtaatcatcgccacgctggcaacgggtccccaggttccggcctgatacggtttcggcgcatcattgtccatcgcccacgcctcagtaatggagtctacccatttccaggcttcttccacttcgtcgcgacgtacaaacagtgcctgaataccacgcatggtttccagcagcaaacgttcataggcatccgccagatgcgtctgattaaaggtttcactatagctcagatccagcttggtgatttgcaggttatgtttgtggtcaaggccaggaactttattcagtacctggatatccacgccttcatcaggttgcagacggatagtcagtttattctgcggcagatcctgccagctttctttaaacagattcagttcaggtgttttgaaatagaccacgacttcagaacatttggtcggcagacgtttaccagtacgcaggtagaatggcacaccggcccagcgccagttatcaatgtcgacgcggatcgccacgaaagtttctgtattgctgctcttgttcgcgccctcttcttccagatatcccggcacttttttgccctgggcgaagcccgcagtatattgcccgcgtacggttttttcgcgtacgttggagcggtcgatgcggcgcagagacttcagtactttcactttttcatcgcggatgctgtctgcgctcaggtcagacggcggagacatcgcaatcatgcaaagaatttgcagcaggtggttctggatcatgtcgcgcatctgaccggctttatcaaaatagccccagcgcccttcgatccccacttcttctgccacggtaatctcaacatgatcaatggtgcgattgtcccagttattcacaaacagggagttagcaaaacgcagcgccaacaggttcagcaccgtttctttaccaagatagtggtcgatacggtaaacctggcactcctcgaagtattcgccaacctgatcattgatttcctggctggtcgccaggctcgtccccagcggtttctccatgactacgcgtgccggtttagcattcagttttgcctcgccaagccctttgcaaattgcgccaaaagtgctgggcggcatggcaaagtagttaatggtgatacgatttttttgatccagcatcgcgccgagacggctgaatgcagcagtgtcattgacatcgagattacaaaaatccagacgtgcactcagggtgtcccataaaccttcatcaatggtttctttcatgaaagtttcgagcgcctcgcggacaactttggtatatgccgctttatcccagtcagcacgccctacgccgataatccgggtgtccgggttgagctgaccggctttttccagttgatacagggaaggcagcaatttacgacgcgcaaggtcgcctttcgcgccgaaaatgaccaggtcacaggcctgggctgtttgcgttaccgccatgtcattctccttaagttaactaacccggtacttaagccagggtatacttgtaattttcttacggtgcactgtactgcttttacgagcttgcgaaaactgtaaacgcttatccacccgtgcgattacgggaaaagcgcgcaaagtgcggcaaaactgataaaaaaatcatcgttttccattgggtaaaaatctgacactgatcatgttatgaaaaaaaataacaacttttttatctgcttttgtcattaacacggcacacaggcgtaatatctgacaaaactgcatttcgatttctttcagtgcggaaatcgtcattacccgtgagtctctttacatcatgaatatgctggaaaaaatccagtctcagctggaacatttgagcaaaagtgagcgcaaagttgccgaggtcattctggctagccccgataacgcgatccatagcagtattgctgctatggcactggaagccaatgttagcgaaccgacggtgaatcgtttctgtcgcagcatggacacgcgcggttttcctgattttaaacttcatctggcacagagtctggcgaatggcactccctatgttaatcgcaatgtcaatgaagatgacagcgttgaaagttacacagggaaaatatttgagtccgcaatggcaacgcttgatcatgtccgtcatagtctggataaatctgccatcaaccgcgccgtcgacttgctcactcaggcaaaaaaaatcgcctttttcggattaggctctagtgccgccgttgcccacgatgcgatgaataagttctttcgttttaatgttccggtggtgtactccgatgatatcgtgctgcaacgcatgagttgtatgaattgtagcgacggagacgtggtggtgctgatttctcacactggaagaacaaaaaatctggtcgagctggcgcagctggcacgcgaaaacgacgccatggtgattgccctcacctctgcgggtaccccgctcgcccgggaagcaacgctggcaattaccctcgacgtaccggaagatactgacatttatatgcccatggtttctcgacttgcacagctgaccgtgatagatgtgctggcgacaggatttactttgcgacgcggtgcaaaattcagagataacttgaagcgggtcaaagaagcgctgaaggaaagccgttttgataagcagttacttaatttaagtgacgatcgctaaaaacgactgtcactgtcctaatcttatacgacatccgaatgagattaatttatcgccatcgcggcgttatttcattcggatttcatgttcaagcaacacctggttgtttcagtcaacggagtattacatgtccagaaggcttcgcagaacaaaaatcgttaccacgttaggcccagcaacagatcgcgataataatcttgaaaaagttatcgcggcgggtgccaacgttgtacgtatgaacttttctcacggcagccctgaagatcacaaaatgcgcgcggataaagttcgtgagattgccgcaaaactggggcgtcatgtggctattctgggtgacctccaggggcccaaaatccgtgtatccacctttaaagaaggcaaagttttcctcaatattggggataaattcctgctcgacgccaacctgggtaaaggtgaaggcgacaaagaaaaagtcggtatcgactacaaaggcctgcctgctgacgtcgtgcctggtgacatcctgctgctggacgatggtcgcgtccagttaaaagtactggaagttcagggcatgaaagtgttcaccgaagtcaccgtcggtggtcccctctccaacaataaaggtatcaacaaacttggcggcggtttgagcgctgaagcgctgaccgaaaaagacaaagcagacattaagactgcggcgttgattggcgtagattacctggctgtctccttcccacgctgtggcgaagatctgaactatgcccgtcgcctggcacgcgatgcaggatgtgatgcgaaaattgttgccaaggttgaacgtgcggaagccgtttgcagccaggatgcaatggatgacatcatcctcgcctctgacgtggtaatggttgcacgtggcgacctcggtgtggaaattggcgacccggaactggtcggcattcagaaagcgttgatccgtcgtgcgcgtcagctaaaccgagcggtaatcacggcgacccagatgatggagagtatgattactaacccgatgccgacgcgtgcagaagtcatggacgtagcaaacgccgttctggatggtactgacgctgtgatgctgtctgcagaaactgccgctgggcagtatccgagtgaaaccgttgcagccatggcgcgcgtttgcctgggtgcggaaaaaatcccgagcatcaacgtttctaaacaccgtctggacgttcagttcgacaatgtggaagaagctattgccatgagtgcaatgtacgcagctaaccacctgaaaggcgttacggcgatcatcaccatgaccgaaagcggtcgtaccgcgctgatgacctcccgtatcagctctggtctgccaattttcgccatgagccgccatgaacgtacgctgaacctgactgctctctatcgtggcgttacgccggtgcactttgatagcgctaatgacggcgtagcagctgccagcgaagcggttaatctgctgcgcgataaaggttacttgatgtctggtgacctggtgattgtcacccagggcgacgtgatgagtaccgtgggttctactaataccacgcgtattttaacggtagagtaagtacgttgccggatgcggcgaaaacgccacatccggcctacagttcaatgatagttcaacagatttcgaatattctgaagcaaacttgaacttatcatcaggcgaaggcctctcctcgcgagaggcttttttatttgatgggataaagatctttgcgcttatacggctggatttcgcccggtttgcgagttttcagcaattttagtatccaggtgtattgttctggtcgcggaccaacaaaaatctcgacttcttcattcatccgccgcgcaatcgtatgatcatccgcctctaacagatcatccatcggtgggcgcacctgaatcgtcagacgatgcgtcttgccatcataaatcggaaacagcggtacaacgcgcgcacggcacactttcatcaaacgaccaatcgcgggcaacgtcgctttataggtggcaaagaaatccacaaattcgctgtgctctgggccatgatcctgatcgggtaaataatatccccagtacccctgacgtacgctctggatgaatggtttaataccgtcatttctcgcatgcagacgaccgccaaagcgacgacgcaccgtgttccagacataatcaaaaaccgggttgccctgattatggaacatcgctgccattttctgcccttggctggccatcagcatggcaggaatatcgacggcccaaccgtgcggcaccagaaagataactttctcgttattacgccgcatctcttcgatgatctccagcccttgccagtcaacgcgcggctgaattttctccggcccgcgtattgccaactcagccatcattgccatcgcttgcggcgcggtggcaaacatctcatcaacaatcgcttcgcgttcagcttcactacgttctggaaagcagaggctcagattgattaacgcacgacggcgactgctttttcccagtcgtccggcaaaacgtcccagccgtgccagaatgggatcacggaactttggcggcgttaaagcgatacccgccatcgctgctacgcccagccatgctccccagtagcgcgggtggcgaaaggatttatcaaactcaggaatgtattcgctattattttttttcgtttccatgcttttccagtttcggataaggcaaaaatcaatctggtgatagtgtagcggcgcaacttgccccgcaccaaataaaaaaagccggtactgactgcgtaccggctgcgaatggatgttaattaatcaaaccgtagctgcggcacaatctctttggcctgcgccaggaattcgcgacgatcggagccggtcagcccttcggtacgcggcagttttgccgtcagcgggtttacggcctgctggtttatccatacttcatagtgcagatgcggcccggtactacgtccggtattaccggaaagcgcgatacggtcgccacgtttcaccttctgtcccggtttcaccagaatcttgcgcaagtgcatataacgcgtggtgtagctgcgaccatgacgaatagccacataataacctgctgcgccactgcgtttggcaaccaccacttcaccgtcacccacactaagcactggcgtaccctgcggcatggcgaaatcaacacctctgtgtggtgcaacgcgaccggtcaccggattagtacgacgcgggttaaaattagagctgatacggaactgtttcgccgtcgggaatcgcaagaatcctttcgccagaccagtaccgttacgatcgtagaatttgccatcttcagcgcggatagcgtaataatctttaccttcactacgcaaacgtacgcccagcagctggctttgctcacgtttaccatcaagcatttctcgagacattaacaccgcaaattcatcgccttttttcagtttgcggaaatccatttgccactgcatggctttaatcactgcgctcacttcggcgctggttaaaccggcgtttctggcgctggcaacaaagcttcccccgacggtacctttcagcagattgttaacccactctccttgctgcatttcgctggtcattttaaaaccgttagcggcagtacggtcataggttcgggtttcacgacgagacacttcccaggtgaggcgctgcagttcgccgtccgcggttaatgtccaggagagttgttgaccgattttcaggttacgcaattctttgtcggccgcagccagttgggtgatatcacccatatcaataccatactgattgagaatgctgcttagcgtatcgccagtggaaacaacatattcatgcacgcccgcttcaccggcgattttgtcatccagttcgtcctggggaatggcttcatcttcttgtgcagcttgatcaatcggctcactggcttcaggtaagaggctacgaatttcgttctgttccagctcaatggttttgacaattggcgtggcatcacggtgataaacataaggccgccagacagcgacggccagagtaagaacggtgaggctccccaacataacgcggtgtggtcgcggtaaattattaaacgccagggcgacagagcgggctatctgttgcacgtaatcacttcctcattaatctcctttcaggcagctcgcatactggttggctaattgactcaggaattcactatagcttgttttacccagtttgatattcgtccccaggggatccaacgttcccatacgaacggatgtccctcgtgcgacgctctcaacgaccgctggcctgaactgtggctcagcaaaaacgcaggttgctttttgctcaaccaactgtgttcttatttcatgtaaacgctgcgcgccaggttgaatctcagggttaacggtaaaatgaccaagcggtgtcagtccaaactgtttttcgaaatagccgtaagcatcgtgaaaaacgaaataacctttccccttgagcggcgcgagctcgttaccaacctgcgtttcggtactggctaattgtgcctcaaaatccttcaggttggcgtcaagtttggctcgactttgcggcataagttccactaattttccatggattgcaaccgctgtagcccgcgctatctctggggaaagccaaagatgcatgttgaaatcgccgtgatggtgatcttcgtcacttttttccgcgtggtcgtgatcatcatcatcgccgtgaatacttttcatcagtagcggtttcacatcttcaagctgcgcaatcgttacctgcttcgctcctggtaatttgcttaccggtttttgcataaacgcttccatctccgggccaacccaaacgactaagtccgcgttctgtaagcgttttacatcgcttgggcgcagactataatcatgttcactagcgccgtcaggaagtaaaacctctgtttctgttaccccatcagcaatggcagaagcgatgaacccaacgggtttaaggctagcgacaacggcggcatctgcggcctgtgttgcacctccccagagagcggcggataatgctgcgaaaagaagcgtttttttatgtaacataatgcgaccaataatcgtaatgaatatgagaagtgtgatattataacatttcatgactactgcaagactaaaattaacatgacaagtctggtttccctggaaaatgtcagcgtttcttttggccaacgccgcgtcctctctgatgtgagcctggaacttaaacctggaaaaattttgactttacttgggccaaatggcgcaggtaagagcacactggtacgggtagtgctcgggctggtaacacccgatgaaggggttatcaagcgcaacggaaaactgcgcatcggctatgtaccgcagaagctgtatctcgacaccacgttgccactgaccgtaaaccgttttttacgcttacgccctggtacacataaagaagatattttgcctgcactgaaacgtgtccaggccgggcacctgattaacgcaccgatgcaaaagctctctggtggcgaaacgcagcgtgtactattagcgcgagcattgttaaatcgcccgcaattattagtgctggatgaacccactcaaggcgtggatgtaaatggccaggtggcgttatatgaccttattgaccaactgcgtcgtgaactggattgtggcgttttaatggtttctcacgatctgcatctggtgatggcaaaaaccgatgaagtgctgtgcctgaatcaccacatttgttgttccggcacaccggaagttgtttccctgcatccggagtttattagtatgtttggtcctcgtggtgctgaacaactgggtatctatcgccatcatcataaccatcgtcacgatttacagggacgaattgttttgcgtcggggaaatgatcgcagttgatttaacgtcggggaaatgatcgctcatgattgaattattatttcccggttggttagccgggatcatgctcgcctgtgccgcgggtccgctgggtagctttgtagtctggcgtcgtatgtcttatttcggtgatacgctggctcatgccagtttacttggcgtcgcgtttggtttgttgctggacgtgaatccattctatgcggtgattgccgttacgctgctgctggcgggcggtctggtatggctggagaagcgtccacagctggcgatcgacacgttattagggattatggcgcacagtgccctgagcctgggcctggtggtcgtgagtctgatgtctaatattcgtgttgatttgatggcttacctgttcggtgatttgctggcagtgacgccagaagatctcatctctattgcgattggcgtggtcatcgtggtggctattttgttctggcaatggcgcaatttgctgagtatgacgataagcccggatctggcgtttgttgatggtgtgaaattacagcgagtgaaattgttgttgatgctggtgacggcattgacgattggtgtagcgatgaaatttgtcggtgcgttgattattactagcttgctgattattcctgctgctactgcgcgtcgctttgcccgcacgccggaacagatggctggtgtcgctgttttggtggggatggtggcagtgactggcggtttaaccttttccgcggtttacgatacgccggcgggtccgagcgtggtgctatgtgcggcactgttatttattctcagtatgatgaaaaagcaggccagctaatctatcgctgaacacatttgtcggatgcggcgcgagcgccttatccgacctacggttcggtatctctggtagtcctggtaagacgcgaacagcgtcgcatcaggcatattgccagtgccggatgcggcgcgagcgaccaatccgacttacggcatttctggcggcgttatgccaaagtgattccacgcccgcgtcgtcgccatacgcccacgcggtgtacgctgcaaaaagccttgctgaatcaaataaggttccagcacatcctcaatggtttcacgttcttcgccaatggctgccgccaggttatccagacctacaggtccaccaaagaacttatcgattaccgccagcaacaatttgcggtccatataatcgaaaccttcagcatcgacattcaacatatccagcgcctgagcagcgatatctgcgctgatggtgccatcgtgcttcacttcggcgaaatcacgcactcgacgcagcagacggttggcaatgcgcggcgtaccgcgagcgcgacgagcaacttccagcgcgccgtcatcactcatctcaagccccataaagcgtgcgctgcgactgacgatatattgcagatccggcacctgataaaactccagacgttgcacaataccaaaacggtcgcgcaacggacttgtcaggctacctgcgcgcgtggttgcaccaatcagggtaaacggcggcaaatcaattttaatggagcgtgccgccggaccttcaccaatcatgatatccagttggtagtcttccattgccgggtacagcacttcttcaacaactgggcttagacggtggatctcatcaataaacagcacgtcatgcggttcaaggttagtgagcatcgcagccaaatcgcccgccttttccagcaccggaccagaagtcgtgcgtaaattaacgcccatttcattggcgacaatgttggcaagcgtagttttacccaaccccggaggaccaaaaatcaacaaatgatcgagggcatcgccgcgcagtttcgctgctttgatgaaaatctccatctgactacgaacctgcggctgaccaacatactcttccagtaatttggggcgaatggcgcgatctgctacatcttccggcaaagtggtaccggcagaaatcagacggtctgcttcaatcatcctttacctcataacgcggcgcgtagggcttcgcgaattaaagtttcactgctggcgtcagggcgagcgattttgctcaccatgcggcttgcttcttgtggtttatagcccagcgccaccagcgcggcaaccgcttcttgttcagcatcgtcggtcgccgggctggcaggagacgtgagtaccaggtcggcggctggcgtaaagagatcgccatgcaaacctttaaatcggtctttcatttcaacaatcaagcgttcggcggtttttttgccaatacccggcagtttcaccagtgcccccacttcttcacgctcaacggcattaacgaactgctgcgcactcattccggagaggatcgccagcgccaacttcgggccgacgccgttggttttgatcaactctttgaacaatgtgcgctcttgtttattgttaaaaccgtacagcagttgcgcgtcttcacgcaccacaaagtgggtgaaaacgatcgcttcctgacccgcttcagggagttcataaaaacaggtcatcggcatatgcacttcatagcctacgccgcccacttcaattaacaccagcgggggttgtttttcaatgatgatgcctctgagtctgcctatcacatgacgctcctgcgtaatgaatcaaagataatgctgtatgataaaaaaatgctggatagatatccagcgaaggatgaagaaaacttgcgaggtgtctcgatgaactgaaaaatggcacagtataatttattctacaggttatattggaagcaaatattttaatattacatattcagtgaagaaatgcgtaataaaaatatacattgcgcctcctgaaaaaataaattttttatgctattacgtatatttgtatctatttcaatggaatgacaacgtgaatattaattaccctgctgaatatgaaattggagatatcgtctttacatgtataggtgctgccttatttggtcaaataagtgctgcaagtaattgctggagtaatcacgtcgggatcattatcggtcataacggtgaagacttcctggttgcagaaagccgggttccccttagtaccatcaccacgctatctcgttttattaaacgtagctctaatcaacgctatgctataaagcgattagacgctgggctgacagaacgacaaaaacaacgaattgttgaacaggttccctcccggctacgcaaactttaccacaccggttttaaatacgaatctagccgccagttctgtagtaaatttgtttttgatatttataaagaagcgctatgtattccggtgggtgaaatagagacgtttggagaattgttaaatagcaatccgaatgcaaaactcactttctggaaattctggttcctgggttctattccgtgggagcgtaaaaccgtcacgccagccagtttgtggcatcatccgggtttggtgttgattcatgcggagggagtggaaacgcctcagccggaactgaccgaggcggtataacttaacgcagtcgccctctcgccaggttcagccggctttcgctcatctgcatcgcattctgactaacgtggcagtgggtgatagcaatcgccagcgcatcggcggcatccgcctgtggattagcgggcagtttcagcaaggtgcggaccatatgctgcacctggcttttttcggcactgccaatacctaccaccgtttgctttacctgacgtgccgcgtattcaaatactggcaactcctgattcaccgccgccacaatcgccacgccgcgcgcctggcccagtttcagggcactgtcagcgttctttgccataaagacttgttcaatggcgaaataatcaggctggaactgggtgatgatttccgtcacgcccgcatagatgagtttcagacgagacggtaaatcatccactttggtgcggatgcatccgctacccaggtaggacagttgcctacctacctggcggatgacgccgtagccggtcacgcggctacccggatcaatgccgagaataatagccatcacgcgtctccgttttgctgtttagcaggcctcatcagagagtcgctgcgacctcatcagagatttcaccgttatggtaaacttcctgcacgtcgtcgcaatcttccagcatatcgatcagacgcatcagtttcggtgcggtttctgcatccatatcagctttggtagacgggatcatggaaacttccgcgctgtctgctttcagacctgccgcttccagagcgtcgcgcactttacccatttcttcccatgcagtgtagacatcaatcgcgccgtcatcataggtcacaacgtcttcagcacctgcttccagtgctgcttccatgatggtgtcttcatcgcctttctcgaaggagatcacgccttttttgctgaacagataggcaacggaaccatcagtaccgaggttaccgccacatttgctaaatgcatgacgcacttcagcaacggtacggttgcggttgtcagacagacattcaatcatgattgccgtgccgccaggaccgtaaccttcgtagatgatggtttccatgtttgcatcatcatcaccgcccacaccacgtgcaattgcgcggttcagtgtgtcacgggtcatgttgttagacagtgctttatccaccgccgcacgcagacgcgggttagcgtccggatcgccaccgcccagcttagccgcggttaccagctcacgaatgattttagtgaagattttaccgcgcttagcatcctgcgcagctttacgatgtctggtgttggcccatttactatgacctgccataaaaatatctccagatagccctgcctgttcaggcagcgttaattacaaactgttcaatcgcctgccggttgctccaggacttagtgagcgccgccgcagcaggcgcatcaagccacttgtaagccagatgttcagtgaaaacgatctgccgctcgtgcggaagcgcaagacagaaccaactttccgtattacgcgtcacgcccggcgcatagcgatgacgtaaatgactaaaaatttcaaactctaccgtgcgctgacagtcaattaaggtcagttgttcagcgacaacatcaatggtgacctcttcctttacttcgcgcatggcagcttgcggcgcggtttcaccctcttccacgctgccggttacgctctgccagaaatcgggatcgtcacgccgctgcaacatcagcacccgtttcgtatcttgtgcgtagatgaccactaagatgctaacgggacgcttatacactttatccttcacgctgcctcttcgttgactgccttcgctcatcccattcacatagttatctatgctcatgggagttcactcagttgccgcctcgatgcaacgcgaatgatttcgtgtatttgagtcatatcagttattctcagccttcttcacaacctgaatgctcagctcagccagtgcagtcgggttagcaaagctcggtgcttcagtcatcagacacgctgccgccgtggttttcgggaaggcgataacgtcacggatattgtcggtgccggtcagcagcatggtcagacggtcaagaccgaatgccagacctgcgtgcggcggagtaccgtatttcagagcgtcgagcaggaagccgaatttctcgcgctgttcctcttcgttgatacccagaataccaaacaccgtctgctgcatatcaccattatggatacgtacactaccaccgcccacttcgtaaccattgatgaccatatcgtaagcgttcgccaccgcattttccggtgcagctttcagttctgcagccgtcatatctttcggactggtgaacggatggtgcattgccgtcaggccgccttcaccgtcgtcttcaaacatcgggaagtcgataacccacagcggtgcccatttgctttcgtcggtcagaccaaggtctttacccactttcaggcgcagtgcacccatcgcgtcggcaacaattttcttgttgtcggcaccgaagaaaatcatatcgccatcttgcgcggcagtacgatccaggatgtcttcgatgatttctgcattaaggaacttcgctaccgggctgttgataccttccagacctttcgcgcgttcgttaactttgatgtaagccagacctttcgcgccgtagattttaacgaagttaccgtattcgtcgatctgcttacgggtcaggcttgcgccgcccggaacgcgcagagccgctacgcgacctttcggatcgttcgccggacctgcaaatacagcaaactcaacagatttcagcagatcagcaacgtcagtcagttccatcgggttacgcagatccggtttatcagaaccataacggcgttctgcttccgcaaaggtcattaccgggaaatcgcccagatccacacccttcacttccagccacagatgacgcaccagcgcttccatcacttcacgcacttgcggcgcggtcatgaaagaagtttccacatcgatctgagtaaattcaggctgacggtcagcacgcaggtcttcgtcacggaagcatttaacgatctgatagtaacggtcaaaaccggacatcatcagcagctgtttgaacaactgcggggattgcggcagtgcgtagaatttacctttgtgcacacgagaaggcaccaggtagtcacgcgcgccttccggcgtggctttggtcagcatcggagtttcgatgtcgaggaagccgtggtcatccataaaacggcgcaccaggctggtgattttagcgcgggttttcaggcgctgagccatttccggacgacgcaggtcgaggtagcggtatttcagacgcgcttcttcggtgttgacgtggttagagtcaagcggcagaacatctgcgcggttgatgatagtcaggctggacgccagcacttcgatttcgccggtcgccatatcgcggttaatatttttttcgtcacgcgcacgtacggtgcccgtgacctgaatgcagaactcattacgcagttcagaggccagctttaacgcgtccgcacgatccggatcgaaaaatacctgcacgataccttcgcggtcgcgcatatcgatgaagatcaggctaccaagatcacgacgacggttgacccaaccacacagagtcacctgctgccccacgtgggacaaacggagctgtccacaatattctgtacgcatgagatatcccttaacttagctgccggcggatgccccctgctgcgcaggtgaccaagtcgcagcgttagctgtatgtcacaactgaatgaaaaaaggcggctattatactggaaattctgccgcaccgtaagagcctggcccgcgctggaacgcctcgttaccactttatatcgggcctgaaatcagactctacgccagtttgctataaaggtgttgcccgaactcataaaaattaacaaaatttgtcgttccgccatcggctaatcgcattaaggtgtgaggcacgattttgttttttcaggagtcattatgcttgaacttaatgctaaaaccactgcgctggtggtgatcgatttacaagaaggcatcttaccttttgccggtggtccacatactgccgatgaggtagttaatcgcgccgggaagctggcggcgaaatttcgcgccagcggtcagcccgtgtttctggtgcgcgttggctggtctgccgattacgctgaagcattaaaacagccggtcgatgcgcccagtccggctaaagtgttgcccgaaaattggtggcaacatcctgctgcattaggtgcaaccgacagcgatatcgaaatcatcaaacgtcaatggggtgcgttttacggtacggatctggagttgcaattacgccgccgaggtatcgatacaatagtgttatgtgggatcagcaccaatatcggtgttgaatccaccgcccgcaatgcctgggaacttggctttaatctggtgattgccgaagacgcctgtagtgccgccagcgccgagcagcacaataacagtatcaaccatatctacccgcgcatcgcccgtgtgcgtagcgtggaagagatcctcaacgcgttatgatttacatcggtctaccgcaatggagccatcctaaatgggtgcggttggggatcaccagccttgaagagtatgcccgccactttaactgcgtggagggcaacaccacgctttacgccctgccgaaacccgaggttgtcctgcgctggcgtgagcagaccacagatgacttccgcttctgttttaagtttccggcgaccattagccatcaggcagcattacggcattgcgatgatttagtgactgaatttttgacccgcatgagtccgttggctccgcgcattgggcaatactggctgcaactgcctgccacattcggcccacgggagctgcctgcgctttggcattttctcgattctcttcctggcgaatttaattatggcgtggaagtccgccatccacagtttttcgccaaaggagaagaggaacaaacgcttaatcgcggtttacatcagcgcggcgttaatcgggtgattttagacagccgcccggttcatgcagcacgtccacacagtgaagctattcgcgacgctcaacgaaaaaaacctaaagttccggtacatgctgtactgacggcgacaaatccgctgatccgttttatcggtagtgatgatatgacgcaaaaccgggaattatttcaggtctggttacaaaaattagcgcagtggcatcagaccactacgccttatctttttttacatacgccagacattgcccaggcaccggaactggtacataccctgtgggaagacttacgtaaaacgcttccagagatcggagcagttccggctattccacagcaatcttctcttttctgaatttgccacctatcatagacaggtgccatcggccattttaaagggagtttgtatggtaagcgcgctgtacgccgttttaagtgcgttgttattaatgaagttctcttttgatgtcgttcgcctgcgaatgcagtaccgcgttgcctatggcgacggcggttttagcgaactgcaaagcgctattcgcattcatggtaacgcggtggaatatattcccatcgcgattgtgctgatgctgtttatggaaatgaatggcgcagaaacctggatggtgcatatttgcggcatcgttttgcttgctggtcgtctgatgcattattacggttttcatcaccgtctgttccgctggcgacgttccggcatgagcgccacctggtgtgcgctgttgctgatggtgctggcgaatctttggtatatgccctgggagttggttttctccctgcgttaacgcacaatacgccactttctttttcccggatttttacgttatgtctcaccgcgacacgctattttctgcccctatcgccagactgggcgactggacctttgatgaacgggtagctgaagtcttcccggatatgatccagcgttccgtacccggctattccaatattatttccatgattggtatgttagccgagcgcttcgttcaacctggtacgcaggtttacgatctgggttgttctctgggcgcggcgacgctcagcgtgcgtcgcaacattcatcatgataattgcaaaattattgccatcgacaactccccggcgatgattgaacgctgccgtcgtcatattgacgcctataaagcccctacgccagtagacgtcattgaaggtgatattcgcgatatcgccattgaaaacgcaagcatggtggtgctgaattttaccctgcaattcctggaaccttccgagcgccaggcgttactggataaaatttatcaagggctgaaccccggcggcgcgctggtgcttagcgaaaaattcagtttcgaagatgccaaagttggtgaactgttgttcaacatgcaccacgactttaaacgtgccaacggttacagcgaactggagatcagccagaagcgcagcatgctggaaaacgtgatgctgaccgattccgtggaaacccataaagcacgcctgcataacgccggttttgagcatagtgagctgtggttccagtgctttaactttggtagtctggtggcattaaaagcagaggacgctgcatgatcgactttggtaacttttattctctgattgccaaaaatcatcttagtcactggctcgaaacgctgcccgcgcagattgctaactggcagcgcgagcagcagcacgggttgtttaagcagtggagtaatgcggtggagtttctacctgaaattaaaccgtatcgtcttgatttattgcatagcgttacggcagaaagcgaagagccactgagcgcagggcaaattaaacgcattgaaacgctgatgcgcaacctgatgccgtggcgcaaagggccgttcagtctgtatggcgtcaacatcgataccgaatggcgttccgactggaaatgggatcgtgttctgccccatctttctgatttaaccggacgcaccattctggatgtcggctgcggcagcggttatcacatgtggcgcatgattggcgcaggcgcgcacctcgcggtggggatcgaccctacgcaactgtttctgtgccagtttgaagcggtgcgtaaactactgggtaatgatcagcgcgcgcatttgttaccgttaggtattgaacaacttccggcactgaaagcctttgataccgtctttagcatgggcgtgctttaccatcgccgtagtccgctggagcatctatggcagttgaaagatcaactggtcaatgaaggtgaactggtgctggaaacgctggttattgatggtgatgagaacacggtgctggtaccaggcgatcgttacgcgcaaatgcgtaatgtctatttcatcccttccgcgctggcgctgaaaaactggctgaagaagtgtggttttgtagatatccgcattgcggatgtgagcgttaccaccacagaagagcagcgacgcaccgaatggatggttaccgaaagcctggccgatttcctcgacccacatgatccgggtaaaacggtggaaggttatccggcacctaaacgcgcggtgctgattgcgcgcaagccgtaaaggtctggtattactgccggatgcggcgtgaacgccttatccggcctacaaaaccttgctaattcaatatattgcagggactatgtaggcctgataagcatagcgcatcaggcagctttacgtttgcataacctcagcgcccgtttccgggcgctattcacgtcttacgcctgaacagctggctgatcaaacgccgttaacttcggtgcattgcccgtatatttttcgatatacaccaacgcactgttaccggcacaggcatttgccagctggctgctggggatatccgccgttaacacgttcgcactgccgtttttacacaagccattttccagatctggccatgcaccttcatgcacgcataccacgccttttttgatcccgtcagtcaccaccgcgcctgtcaaaatctgaccacgtttgttccagacacgcaccagatcgccattcgcaataccaaagcgtgcagcatcttcggtgtgaatagtgattggttcacgatcggcgatcgcatattttttacgcagttccgcatagttaagctgactgtgtaaacggtgtgccggatgtgcggtcagaagctgtaactgcttctcgtcggcggtacctttccattcatcaggagccagccaggttgggtgtgccgggcaatccttatagccaaatttttccaacgttttactatagatttcaattttgccgcttggcgtacccagcgcatttttcaccggatcggcgcggaaatcaccataacgaacgtactgttcgttcttctcgctgtggcgcatttcgatcagtttattttgctgccagaaggcattaaacattggcatagtgacgcgttgcgcacgggcacctttctgagcggcatcatagaaaaatttcagccacgccatttcatctttaccttcggtatagatctcttttccgccaggtttgagtaattccgcaagatcggcaaacacgtcaaaatcgttacgcgcttcaaattgcggagcaacagcctgcttcatcggcacaatatgctggttgctgtaatcaccggtcatcgtcaagtcattgcgctcaaagcttgtggtgatcggtaatacgatatctgcgtgtttggctgctgcggtccagtagcattcagaaacgacgatcatctccggtttctgccatgctttaatcagacgattagtatcctggtgatgggtaaagttaccgccacccgcccaccagatcattttgatattcggatacgtttgttctttaccgttatgctgatatttgccgccaggattttccagcgcatcgacgatacgggcaacaggaatcgccgtcattccgccatcatcagcggcctcgctggcatgtccggcaatcgccgcagacatttccggcagcacgccgccaacacgcgtcgggttgccaccgttggagtaatgataagagaaaccaaaaccgccgcccggtgtaccaatctgccctaacatcgccgccagcgtcaccagcatccagtgtttctgttcaccatattgctggcgctgaattccccagcctgccatcagcattgtgcgattcgccgccatcagttcagcgagtttgactatctgcgcttccggtacgccagtaatttccgccgcccagaccgcgctcttcggcgtattatcgctcttacctgtcagatactcttcaaactgcggatacccggtagtgtatttttcaaggaacactttatcgtgtttgccttgtgtcatcagggtatgcgcaatccctaacatcagtgccacgtcggtgcccatattcggcgcgatccaggtggcattatcgtcaaagaattcgatggtttcggagcggataggatcaatggcaatcactggtttgccagattttttcagctgatggaagtattccagcccttgctcatcggtactgctccaggcaatttttaaggtattcagcgggttcattccccacagcaccacaacctggctgttttccagaatcagcggccaggaggtctgctgttcatacacctctacagaaccgaccacatgcggcatgatcacctgtgctgccccggtactataatcgccgctatgcccggaataaccgcccgccaggttcatataacgttgcagtaaggtttgcgctttatgcaacacgccagaagagcgccagccgtaagatccggcaaaaatggcgcttggtccgttagctttacgaatacgatcatgttgctcatgaatcagttttaatgcctgttcccagctcacctgtacataggtatcttcgccacgacctttcgccggttgcagtggattatcgagatagctttttctcaccatcggatgctgaatacgcgccgtggtgtgtacctgatccgccgccgtagactgtaaggaattcggtatggttttcgccagcgcgcctgtactagaaacaatcttgccgtccttcacttctacgttcatcgctccccaacgtcccgcggtgaggattttaccgcccttctcttctgcccatgcggggagcggtgctgcgcttgtcaccaccagcgctccagcggcaataccgctgtgtttaataaattcacgtcttgttaatgtcataacttcctccctgatcaacgaggatcactgtttctcggtaatatctttggcgttgtactggaaataccgcgttaaaatgtccagttcgttttcgctcatgctggttcgtgcccccattcctttggcaatggacggccacgcattgacggtgtaatggtcggcggcaataggggcatgacaaccagcgcaataggtatcgtcaagtttttcagcgtattgccatagcggtttacggtccgctaatgcgggatcggtaagcgcaccctgtaaagacgcctgacgccattgattgccgtattcgtcagcctgccattccccgtttacagtgagcgccttgataccttcttcacttaatgtggctagcgccagccgttgacctgccgccaggtagagcgtgttttcactgccctgcatttgataaccctgcaacagaacgatcggctgtttgccactggcatcaacgacggtgagatcggttccaggattcacggtagccagctcgcctatgtgagaagttttgaaaggataaatatgtgcgccattagtaacactagtagcggcctgactttccagctcatgcgccgcgttgtcatccatttttatttctggcggaaaatgggcaatgcctttatgacaatcgatacaggtttcgctgtccttttgtgctttgttatgcattttctgcgcagattcactttggctggcaatatccatggcatcaaaagaatggcaactacggcacgttgcagagtcagtggcttttaattctttccatactgtttcggccatttcctggcgatgagcttcgaacttatcgtcactgtctattttgccgctaacaaattcatgataaatatctttagatgcctttaatttagcaaataaataatccatcccactctttggaatatggcaatcggcacattccgcacgtatccctttctggttgctaaagtggacagttccctgatattcctcaaaaggtttactcatgctgtggcaggaaaggcaaaatgctgtatcgctcgttttatgtaagactttttgcgccagcaataacccgccgccaccaaccacaaccgctatcagcaaaaacaataacccaatgcgttttttccctcgcatagattcctctaattaaattactggacaccgaaatcattgtataattaaatatacaacgaattaaccgcttgcataattaggcacaacactgcctgaaacaatcgataaagaatatgatttattacaatgtaatcattaattgctaaggaataacccagttgctatttagaatatatatttatcagttttagtaatttaaatcccataattaatgtgaatatatacaatatttttagcacaacgctatgcgcactgtcacccgctcaacagatcacggttatcgttcgttttttatactgttcagggataaaaaaaggcccctgttgaaattgcaggggcctggtacgagcaagcatcatattgggcgacatgatgcaacggtaaaaatcatttggcctgatggcgttcaatgattcctttcatttcagcaaccgccgccccgtctacgatataacggctatactcgtccgcgtgttcatcactactcatggacaatccttgattacgataacgcatcggactggcttgccacgctcccgcggagctatggacttccagcactccggcatcgaggaagtggtgcaggttttctgcacggactcctgctccggccataatgattggagcatcacgatgggcaataagttccataattttacttaaaccttgcagtgcgtcacttttttgcccacttgtcagtacccgggcaatgcccaattccgcaagattattgagtgtatataaagggttagcgcacatatcgaaggcgcgatgaaaagtcactgccagcggaccggcagcagccattattttttccattcgtggcatatcgacattcccgtcaacatcgagaacgcccgtcaccagtccaggaaaacctaattcgcggaccgtgcgcacatcctcaagaatggcggcaaactcaccgtcgctgtagcaaaaatcaccaccgcgtgggcgaattatcggatgcacagggatcgtcacccgctggcgcacggatttcagtacacccaagctcggcgttaagcccccctcttttggggctgcgcataattcaactctgtctgcgccgttttgctgcgccgttagtgcacattccatgctgtaacagcaaatttccagtaatgccatttttactccttaattacgcgctctgctcgctggcaacgatctcttcaatggaccacggatgaaacttaatagttgttttgccatcggtgaccgccagcgtcggattcggtaatcgctcatgctcaccttttgggctactggttttcacactgatccccggtaggctgagtccttcatcagaaagcaatgccagcgcacgggcattcagcgtttctggatcacccggcagaacgatttcaatatgttcccaaccttcgtgtgggtaacgtttttccccgggccacggtagctccacaatagaaaactgccagtgcgcaacctgtaccggttcatgcaatttaaacagacaaatcggtctgccattgatcatattttcactcaaaagctcgccacactgttcaaacccgcgacgccagcgttcagcagtggcgttttgatggcaacgcaaagaaatgtgatcggcagtcagcggagtgatattcaaccccagacggcgggaaagttcatctaatgcgtggataaatcgcggtaaatcgcttgcaatatcctgcagctcgtcgatagattgccagttcgccataatcactcttcgtctttcagtaaaagcgttaatttaccctgttgccctgtgccaaccaaccgctgatttcacgccgcttctgatgcaatagtgaaaacggcaatacgccacgcgcacgttgctgacgaaaacagccatttgcagtatactcccgccctaatttctttaactggtgcgggcaatttttgctcgcttcatcaatgtaaggtattccggtgaatattcaggctcttctcagtgaaaaagtccgtcaggccatgattgcggcaggcgcgcctgcggattgcgaaccgcaggttcgtcagagtgcaaaagttcagttcggcgactatcaggctaacggcatgatggcagttgctaaaaaactgggtatggcaccgcgacaattagcagagcaggtgctgactcatctggatcttaacggtatcgccagcaaagttgagatcgccggtccaggctttatcaacattttccttgatccggcattcctggctgaacatgttcagcaggcgctggcgtccgatcgtctcggtgttgctacgccagaaaaacagaccattgtggttgactactctgcgccaaacgtggcgaaagagatgcatgtcggtcacctgcgctctaccattattggtgacgcagcagtgcgtactctggagttcctcggtcacaaagtgattcgcgcaaaccacgtcggcgactggggcactcagttcggtatgctgattgcatggctggaaaagcagcagcaggaaaacgccggtgaaatggagctggctgaccttgaaggtttctaccgcgatgcgaaaaagcattacgatgaagatgaagagttcgccgagcgcgcacgtaactacgtggtaaaactgcaaagcggtgacgaatatttccgcgagatgtggcgcaaactggtcgacatcaccatgacgcagaaccagatcacctacgatcgtctcaacgtgacgctgacccgtgatgacgtgatgggcgaaagcctctacaacccgatgctgccaggaattgtggcggatctcaaagccaaaggtctggcagtagaaagcgaaggggcgaccgtcgtattccttgatgagtttaaaaacaaggaaggcgaaccgatgggcgtgatcattcagaagaaagatggcggctatctctacaccaccactgatatcgcctgtgcgaaatatcgttatgaaacactgcatgccgatcgcgtgctgtattacatcgactcccgtcagcatcaacacctgatgcaggcatgggcgatcgtccgtaaagcaggctatgtaccggaatccgtaccgctggaacaccacatgttcggcatgatgctgggtaaagacggcaaaccgttcaaaacccgcgcgggtggtacagtgaaactggccgatctgctggatgaagccctggaacgtgcacgccgtctggtggcagaaaagaacccggatatgccagccgacgagctggaaaaactggctaacgcggttggtattggtgcggtgaaatatgcggatctctccaaaaaccgcaccacggactacatcttcgactgggacaacatgctggcgtttgagggtaataccgcgccatacatgcagtatgcatacacgcgtgtattgtccgtgttccgtaaagcagaaattgacgaagagcaactggctgcagctccggttatcatccgtgaagatcgtgaagcgcaactggcagctcgcctgctgcagtttgaagaaaccctcaccgtggttgcccgtgaaggcacgccgcatgtaatgtgtgcttacctgtacgatctggccggtctgttctctggcttctacgagcactgcccgatcctcagcgcagaaaacgaagaagtgcgtaacagccgtctaaaactggcacaactgacggcgaagacgctgaagctgggtctggatacgctgggtattgagactgtagagcgtatgtaatcgatttttcgtgagagtgaagcctgatcagggttagccgatcaggcttttttattgccatctaaatgtattctgaaaatggacatgccattgttttctcactgttggataagaggccagaagcgtaatatccggccccagggaaacgataacggttgaatttaaggaataccgcagtgtttaaatttcttgtattaacattaggcattatctcttgccaggcttacgcagaagatacggttatagtaaacgaccatgacattagtgccatcaaagattgttggcaaaaaaatagtgatgatgatactgacgttaacgtgatcaaaagttgcctgcgacaagaatacaatctcgtcgatgcgcaattaaataaagcctatggtgaagcttatcgttatatagaacaagtgccacgcacaggtgtaaaaaaacctgataccgaacaacttaacttgcttaaaaaaagtcagcgagcctggctggattttagggacaaagaatgtgaattaatccttagtaatgaggacgttcaggatttaagtgacccttattctgaaagtgaatggctcagttgtatgatcatacagaccaatacgcgaactcgccagttgcagctataccgtaactctgaagatttttatccaagccctttgacaagaggataattcacatctttttggcatgttttgttgcaagctattcctgataaataattgcaacaagacatcgagcctttttcactgagttattaaacatactcgcgagcgcgtcgctacgctagcaagcaaaaatgaaacaggaataatcgaaatgggatgttgcgcacagtcaaaataactcaccgtaaataatcatctgctataaataatcactttcatgcaataccagataagctatttttaaacagacacttaccgcacaacaaactaattaaatacaaagaaaggcaacaatcaacttaatgttaatgaaatgttttacatatattaaccacttgtttaatgcggagaatcagtacactattttcttataattacatttgaaattatatgatcaccgggagtgattgattaattatctttactaataatcagactaatatttacctgtttgaccgagttgggattgcgtcgtttctccattaggagtaaagctttaatgtcacctgaagttcacagaataaggaacaggttatgagctatagcaatattcttgtcgctgttgcggttacaccggaaagtcagcaactgctggcaaaagcggtatctatcgccaggccagtaaagggacacatcagtttaattactctcgcttccgacccggaaatgtacaatcaattagctgcgccgatgcttgaagatttacgcagcgtgatgcatgaagaaacgcaaagctttcttgataagttaattcaggatgcggggtatcccgttgacaagacgtttattgcctacggtgagttaagcgaacatattctggaagtatgtcacaagcatcatttcgatttggtgatttgcggtaatcacaatcacagtttctttagccgagcatcctgcagcgcgaaaagagttattgccagtagtgaggtcgatgtgctgttagttccacttacgggagattaaccgctcttacgcaagctttggaaaggtagcaactttatcgcgctgctggctttccgcgcttcgcggaactatctgctttaggtcgctaatgaagcactcctgccagtggttaatatcgtttttcacgataacgtccagcatttctgcatgacgggaaatacgttccgccaggctcatagtcaatgcacgatccagcgcagctgcaacttcgtcacgatcgtaggggttaacaattaacgcgctcgttaactcgtttgccgctcccgcaaattggctaagaacaagaacgcccggattggctgggtcctgagcagcaacatactcttttgctaccaggttcatcccgtcacgcagtggcgtcactaagcccacgtcagagtagcggaatattttcatcagtaatttacggtcaaaatgctgattcaaataataaagcggcgtccagcctaattgcccgtatttaccattaattcgtccagcttcattttcgagctgatgacgaatatcctgataggcttgcacatcaccacggctcgttggtgcaatctgggtataacgaattttaccatgatgctgcggatatttttccagcaacgcttcataggcgagaaaacgctctggcaaacctttggaataatccagccgttcgacagaaaagatattttgtacgtttttcagttccgctttaagttgcgccagttttggcggcagtggcccggcagcctgtttggctatttctttcggttcaatgccgatcgggtagacttctgttcgaaatgctttgccccaggctgtatggctttttgcgctacgtgtcgtgacgcgggtcaggttagaaagacaatccaggaacgccagacgatcgttttctgtctggaaacccagcaaatcataatcacaaagctgttcaagcaaggtgtcatatgtcggcagcgcgttgaagatttccggtgtcgggaaaggaatatgcagaaagaaaccaatgcgattattcactccccgtttgcgtaattcatgcgcaaatggcaacaggtgataatcgtggatccagataatgtcatcgtcttgcaacagcggcagtaatttatctgccagcaacgcatttacgcgtagatagccgtcccaggcaggacgctgaaattgcaccagatcgagccgataatgaaaagcgggccagagaacggcattggagaattggttgtagtattcgtcaaggtcctgttcgctgaggttaaaagaggcccacgtaatgttaccttttttcaccttttttagcggctgatcctcattccctgtttcaccactccagccaaaccacagtccgcctgcggctttcagtgcccccagtatgccaacggcaaggccaccggcactggcggcgtgctcgtctggtggtgcaatccggttagatactacgactaaacgactcatagtcatcactcctgttatttttacttagatactacgactaaagctctcatagtcatcactcctgttattttctcttttttgttgtaatgcggtggttatcatttcaagccagctccagacatccggcacacccgccagtcgccaacttgcctgagttgcacctgtgccaatttttacactcattccgcccagtcggttaacgactgcgaagccagattcatcggttaaatcatcgcccagaaatacgggcgttcgcccgataaagggagcttcctgcataaaagctgcaattgcctcacctttactggtacctctcggtttgatctcgacaacacactttccctgctgtaacgccatttgtggccagatctgagtaatacgttgcgctaatgtcattaatgcgtcttcatgctgcggagcctgacgataatgcagcgcaaaagccatccctttcgcctccagctccgcgccgggatactgagcgatgactgtatgcagttgcacgctaatatcacgcgcaatcgcatccggcagatgaacgatatgtgttttaccattgatgtcacggcgctccgccccatgcacgcccgctaacgggaagcgataaggttttgccagtgcgtcaagctccaccatactgcgcccacttatcaatgccaatgcaccatcacttgcggttgccagtagctgtagtccttgcagaatattgtcaggcacgacgacctgatcgggatgcggtttgatttccgccagcgttccatcaagatcaaaaaaccaggcatatttcgcggatagttcaggggtttcggttaacggttctgtcacccggttctcctccttctcttttcttattgtgttgcgcagaacgcgctttacagacatgtaagtatagacagtgtgacgggggtcgccatttgcaacgaagaacagccaaccgttatggcggttggctatggtgggaaaaaacgctaaattgttgcagaaaaaagcatcagacagtgcgtttcgctttttgcttgtaacggtcgaagatcaccgctgccagcaggattaagccgcgaaccacgtactgcgcgaaaggagaaatattaagcaggttcatggcgttttccacggtgcctaaaattaagatacccgccaccacataactgatttttccgatgccacctttcagagaaacgccacctaaaacgcaggcggagataacaatcagctcataaccaatgctcgtcattggctgcccactggtcatacgactagccagaataattccggctatcgcacttaccaggccactgagaacaaagataataattttggtgcgaacaaccggtacacccgccagacgcgcggcctcttcgttcccgccaatcgccagggtgttacgaccaaaggtggttttattcagcagcaaaccaaagataatcagacacgcgacggtgagccagattggcgcaggcagaccgaaccagttggcgtaaccaagggcaaagaagctttcatcttcgataccgaccgctttaccgtcactaatgatgtacgccagacctcgaacaatctgcatcgttgccaatgtcgtgatcagagcatttattttcagtttggcgataacaaagccattgaccaggccacagagaacgcccagcaacaaccccgctgccacgccaatccacaggctttcagtcaggttaataaccaccgccgtggtgacacccgcacaggcaattacggaggcgacagaaaggtcaaagtcaccggaagcgaggcagaacaacatgccacaagccaccatcccgctcatggaaattgccaggcccaaccctttcatattaatgaaggtggcaaaatttgggacaaaaatggcacaggcgataaagagcaccgcaaacaccaccagcatgccgtactgatcccagatacgcccgaagctgaaactgctcttaggtgcgccagacccgcttgtagaaacagaagacatcatactctccttactcaggcaacagcctggctgactttaggcatcgcaaggctcagtgcctgacgctcatctgcctgctcgtgtaacaattcaccggcgatttcaccttcccgcatcaccacaatccggtcggcaacgccgaggacttcaggtaagtcgctggaggcaaacagcaccgccacgccctgcgccgccagcgcataaattacgttatatatttcgtgcttagcgccaacatcaatgccgcgcgtaggttcatccagcaaaatgaccttcatctcttcgcttaaccagcggcccagaatggctttttgctgatttccgccactgagattcatgatcagttgctccgcgcccggcgttttgatgttgaggctacgaatgtggtgatcggcattgttttcttcccaaccgttgttgattacacaaccgccgagcacatgtttacgtctggcactgatgttgatattgtcgcgaacggagtgcacgggaataatgccttccgctttgcgatcttccgggcagagcatcatgcctgcggcaatggcgtggctcggtttacgaatatcgatcggctgttggtcgatataaacctgaccggcggtgatttgcgtcccgccaaacatgcctttcattaattcgctacgccccgcccctaccagaccaaacagcccaacaatttcaccactgcgaaccgccagacttattggcgtacgcacgcctggtgctttcacagcatcaagacgtaggcgctcctcgccataactacgcggttgccagccgtagatatcgccaatgtcgcgcccgaccatcgcctgcaccagcgcgtcgtggtcaacctgctgcatatcggtaaaggttttgacataacgtccatctttaaagacagtaatggcatcgctgagggcaaatatttcttccatacggtgagaaacgtataagattacccgcccctcttttcgcagttcacgaataacgcggaaaagattgtcgatttcacgggcagagagggagctggttggctcatcaaaggcgataattttggcgttacgcgccagcgctttggcgatttcaaccatctgccactgaccaatggagagatatttcagcggcgtgtccgggtcaatatccataccaagatgtttaagttgtaaacccgcctcataattcagcaaactgcgattcacaatgccgcctttatgcggcagctggccgagatagatgttttccgcgacggtcatttccggcacgagatgcagttcctggtaaataatcgccacgcccgcgttaagtgctgcggtcgtgtcggaaaaggacatttcctgcccattaatcactacagaacccgtggttggcgcatagttgccgctgaggatttttaagagagtactttttcctgcgccattttcacccatcaacgcatgaacctgaccggcatagcagtcaaaactaatatccgtcagcgccttaacgccgggaaacgttttaccgatgccgcgaaaactgagatacggggtagactgttgcataacgtctccgtgaatcactggtcgttcacaccccctctgcatcatgcagaggggaatttttccggcaaattacttaccgcctaaaccttttttctccagttcttctttaaagttgtcacgcgtgatcagtaccacgtcggtaacttcggtaaattttggcggttcaacgtcttttgctacccagttgtaaagcatttcgctggatttatagccatgtacgtccgggcttggcagcagggaaccgtagaagccggttgcctgtgctttagacagttcgctcaccgcatccacaccgttaatgccaatgccgatgatatcggccgctttaaagccctgaccttccgtcgcgcgtacgccgcccagcacggtgctgtcgttcataccgacgatcagccaatgtttaacttccggatgttgaaccagcatactgttggcagcgtcaaatgcccccgggatgtcgttagatttggtaggtacctgataaatttgtttttccgggaatccggccgctttcagcgcatccatagatcccgtagtacggcggcgggcggtatccagttcgttggcggtaatcgccatcaccgcgctttctttgacatcccagccacgtttctgcatctctttatacagttcctggccctgacgttcgccaattttagtcgccgccatcatcaccagcggaacggtatccattggcttacctttggcgttaacaaactggtcatccacggcaatgactttcatatcgtagccacgcgctttcgcgacgatggcagagccgagtttggggtccggagtacaaataacgaaaccttttgcgccactggcagccaggctgtcgatcgcgttcaatgttttttcgccatccggcacggcaatcttaataacctcaaaccctaaatccttcccggctttatcggcaaacttccattcggtctggaaccacggctcttccggttgcttcaccagaaaaccgagcttcaggttctccgccatagcggattgactcataacggctgccagaccaatggctgccagggctttagtaaatttgtgcatggttctctccagctttagtgtcgttttgtgtagggcaaaaacgaatgacattcgttaaattaatcggaaaacaaagcattaccttttaactaaaagataagtgactgtgttgacatagttttagcgagaaattaattctccataggagagcaatatcacatcgcagaattacagtgagaacgtgcataaatttagcgggaaaagacataagggaaagccaatttgtcagacaaattgtcgaatgcacagcagattaatccataagattagcctggaaatccttgttgtctttggtacccatgcgggatgtcttctttttaaccagtcaataggccgcattacctggcgttgagtttttgaaatggtgtaataaccgcaactcaaagatgtggaaaatgcacgtcattcatttcgtcattaattatcactgtgctcattaattaacagaacacgtataatgagagccatctcgcaaaaatgaaaaaacgttttataaaatcatcacttcatcatgaattcaaattcattgattaatatcaacaagatacaaaaagcactatcattaaaattcattgcagttacattgatttcatcaatgaaatgtaaaaatatataaacttgatgatttaagcattttcttatacccgttcagacgttattcttatttcagatcatcgtcagaattgactccacgatcacatttcggaccggcagaaaggaattattctgcaaacagtaattatggtgttttgatttatcttgcacctctccacttctggatataaggatattaggtatggcaaccgctggaatgcttctcaaactcaactctcaaatgaaccgcgagttttacgcatccaatctctaccttcacctgagtaactggtgttctgaacagagtctgaacggcaccgccactttccttcgcgcccaggcacagagtaatgtgacccaaatgatgcgcatgtttaactttatgaagagtgtcggcgctacccccatcgttaaagccattgatgttcccggtgaaaaactgaactctctggaagaactgttccaaaaaacgatggaagaatacgagcaacgttctagtacgttggcacagttagccgatgaagcgaaagaactgaatgatgatagtaccgtcaatttcctgcgcgatctggaaaaagaacagcagcatgatggtctgttgctgcaaaccattcttgatgaagtgcgcagtgcgaaacttgcgggtatgtgccctgtgcagaccgaccaacatgttctgaatgtcgtgagtcaccagctgcattgatcatcatcggcgctaatgcattgcgccgatgaaggttttgagaaaccgctgcctcatctgtttgaagcagcggtttttttaatgggattcaccctgtggggtaaacttgagttcaataagcgcgatggctttttggattgcccgcatggtgaccgggtctgcggcggcgggatggttagtaaagtcgatattcttcagctgactggacattttttcacgaacttcaacgggcgcgattacatcgagaacatccagaatttgtttgataaccaactggcaagcaaccacatcagaaaccaattcctgatcggcattcagcggctgggacatcgtaaactcctgatagcattttgaaagccgttatagtagcgacttcacatcttcagcgatagtcacatccaccgtcatcaggacacaaaaaaacctgccggagcaggttttttgttatcggaacatattgcctggcggtacgtctttgaacgtcttgcaatagttattgaacatacttttcaggattttgcgcagtttcatcgcggcactccgaccatttgttatacaggtgttattgtctttgcgcttataatatgacaaccatcacaaaaatcaatctttatgtgatacaaatcacataaatacccctttaatgttataaaaatgataatcaaaaaacagcccccctatttctgacacctacagatggcaagaaatagcgcctgccaggcgtcttttccggccattgtcgcagcactgtaacgcgtaaaatagtgctttctcttactcttctggctggaccatgagacttctgattctgactcttagtttaataacgctggcggggtgtacggttactcgccaagcccatgtgagcgaagttgacgcggcaacaggtattgtacggttagtttatgaccaggcttttttgcagcatgcccataccgatcgttatgtcagtcgcgggatcgccgatcgcgcatgccagcaggaaggctatacccacgcggtcccctttggtcagccagtaggcaactgtagcctttttgcgggttccttatgtttgaatacggaattcactttgagttatcagtgccatcattccgccttccctgtctttctctaaatattttaatcagcgaggggatcttcgctgattaaagaaatagcggtaatgcgttttattcccattcgtatttttaataattgaagtttatattttaccttttgcaaataataaaataacaaattatagtgacgccacagcaacaaatataacctttgtggagcactatcatgctgaaaccagaaatgattgaaaaacttaatgagcagatgaacctggaactgtactctagtctgctttatcagcaaatgagcgcctggtgcagctatcataccttcgaaggtgctgccgcgttcctgcgccgtcacgcccaggaagagatgacgcatatgcagcgtctgtttgattacctgactgataccggcaatttaccgcgtattaataccgttgaatctccgtttgctgaatattccagtcttgatgaattattccaggaaacctataaacacgaacaattaatcacccagaaaattaacgaactggctcatgctgcaatgaccaatcaggactacccaacatttaatttcctgcaatggtatgtttctgagcagcatgaagaagagaaactgttcaaaagcattattgataaattaagcctggcaggcaaaagcggcgaaggtctgtattttatcgacaaagaactctctaccctcgacacacaaaactaatgctctccggcggcaggtttactgccgccgtttcaaatcagtgacggcaaatcttactctgatcggtgctaaaaccgtctttgctaggtataaatttgccttttgctgccagaaacgctaccagctctcccgctgtcatcccttctgcgctgcaggtgtgaaaacgtgcctgttcaccaaaacgcgctttaatcgcagcttccagactggcatgcgtatattgctcgccactttcaatcatcatatttaacacttcatgaccgtgaatagagtccatcgtccctcctcaaaaaaagcctagcgtagcgattgccgcttatgaagactttgcgccagcgcaggactgaatgctttttattgtacatttatatttacaccatatgtaacgtcggtttgacgaagcagccgttatgccttaacctgcgccgcagatatcactcataaagatcgtcaggacagaagaaagcgtgaaaaacagaaccctgggaagtgtttttatcgtggcgggaaccacaattggcgcaggcatgctggcaatgccgctggctgcggccggtgttggttttagcgttacgttaatcttgttgattgggctttgggcgttgatgtgctacacggcgctattactgctggaggtgtaccagcatgttccggcagataccggtctgggcacgctggcaaaacgctatctgggacgctacggtcaatggctgacgggcttcagtatgatgttcttaatgtatgctctgactgcggcatacatcagcggtgccggtgaattgttggcctccagcatcagcgactggacaggtatttctatgagcgcaaccgctggcgtgctgttgttcacttttgttgccggtggcgtggtttgtgtcggaactagtctggtcgatttatttaaccgttttctgttcagcgccaagattatttttctggtggtaatgctggtactactgctgccgcatattcacaaagtgaatcttttaaccctgccgttgcaacaggggctggctctgtctgcaatcccggtgatttttacgagctttggttttcacggtagcgtgccgagtattgtcagctatatggatggcaacattcgtaagctacgctgggtgtttataatcggtagtgcgatccccctggtggcatatattttctggcaggtggcgacgcttggcagcattgatagtacaacctttatgggattgctggctaatcatgctggattaaacgggctgttacaggcgttacgcgaaatggtggcctctccgcatgttgagctggcagtgcatttatttgctgatttagccctcgccacgagttttctcggcgttgcgttaggcttatttgattatctggctgatttatttcagcgtagtaataccgttggtggacggttgcaaactggtgcaattacgtttctgccgccgttggcgtttgcactgttttatccacgaggatttgtgatggcgctgggttacgccggtgtggcgctggcggtactggcattgattatccctagcctgttgacctggcaaagcagaaagcacaatcctcaggcgggttaccgggtcaaaggtggtcgtccggcgctggtggtggtgtttctctgtggtattgctgtgattggcgtgcaatttttgattgcggcagggttgttaccagaagtggggtgatcagatagcctcaaattccttattgggtgccagaattaacgctgacacccaatttggcctcttaatgcaggcagcactgcttaaatttcttaccactaccgcacgggcaaggatcgttacgccccggtttctcttctgctttgatcggttgctgaacagctttttcctgcggatgcgccatccagtacgcatgtagatcaagcgccgccagtcgaatggcatctacgctctcttcaaacgcttctgggctcatcttttctacccgctcgaagttttcctcagtaccgtgcagcgcaatcgcctccagcgctggttttaagctatcgggcaacgtactccagtcagaaagtgccacgccccgcatatagccaaagcaccactcctcaacaatcgtcagctcgctgccatcaacttctcgcaagccgaataacggctcaaactgctccgggaattcgttcagacgctctgcggtatcggccatatgttgaaaagccagattcataaagcgcgtcatctctttctcactcgcccagcgcggcacatagtcagccccaccccacacggcaaccagccactgttccggttcaatctcttgcggagaactcaacaccgccgtcaataaaccgtccagctccgccacatcaaggatggcgtggtcagtgttgtatttggtcagaatatcgtccagccattccaactcactttcgtttaacggtcccgttttcatacgcttttccttgtggatctcaactcgccagcacctatcttacatgccggtccgtatcagagatactttttgagtggctttgctggtgattaaaaattaaggagggtgtaacgacaagttgcaggcacaaaaaaaccacccgaaggtggtttcacgacactgcttattgctttgattttattcttatctttcccatggtacccggagcgggacttgaacccgcacagcgcgaacgccgagggattttaaatcccttgtgtctaccgattccaccatccgggctcgggaagaaagtggaggcgcgttccggagtcgaaccggactagacggatttgcaatccgctacataaccgctttgttaacgcgccaaattcttcaggcctttcagccagacatccgcttgacgccgatgtcttttaaactggagcgggaaacgagactcgaactcgcgaccccgaccttggcaaggtcgtgctctaccaactgagctattcccgcattcatcaagcaatcagttaatcacttgattttattatcgtctggcaatcagtgccgccgttcgatgcgttgcattctacttacctggcgcgatgagtcaacgatatttttcaccacttttgatcgtttgctgaaaattacgccgaaacgatcactgatcaagcaaatctgcacgcgcagcgctcaaatattgcaacatactccacagagtcagtaccgcagccacaaagaaaagtgcaataccggcgtactcaacccaaatgttcggacgccacagcagccatgccaacgccaccatctgggcagtggttttcactttcccaatccaggagacggccacgctactgcgtttacccaactccgccatccattcgcgtagcgcagaaataataatttcacgggcgatcatcgttgccgccggtaatgtcacccaccagctgtgataatgctcggttaccagcaccatggcgatagccacgagaactttatctgccacagggtcaaggaaagcaccaaaccgggtactctggttccagcggcgtgccagaaaaccatcgaaccagtcagtcaccgccgcgacgcagaaaatgagcgcggcggcaaacgggctccaggtgacaggcagataaaagaccaatacaaagaatgggataaggatgacacggaacagtgtaagcaacgtagggatattaaattgcataatgacgggtaactatctgttgtcagtaagattacccctatgttgctacagagacatcaatgtttcaagctccagaagatcttttctgccagaccttggctaatacccggcacttttgcaatttcctcgacgctggcgttacgtaaaccttgcaaaccgcccatatatttcaacaacatttgccgacgttttggcccgacgccttcaatggtttccagggaactggtatttttgaccttcgcccgttttttacggtgcccgccaatcgcgtgatcatgactttcatcgcgaatatgctggataacatgcagcgcgggactatctggcggcaaactaaatccctcaccttccggctcaaagaacagcgtttccagtccagccttacgatctgctcctttggcaacgccaagtagcagcggatgatttttatcccaactgacatccagttcggcgaagacatttttcgcctgcgcaagctggcctttgccgccgtcgataaggatcacatccgggatcttactgtcgtcaatggctttaccataacgccgacgcagcacctgattcatcgccgcataatcatcgcccggcgtgatgcctgtaatgttatagcgccgatactccgcacgcagcgggccgttagcatcaaacaccacacaggaagcgacggtttgttcgcccatggtatggctgatgtcaaagcactccatccgcttcacttccggcaatttcaacacgctggcaagcgcggtcagtcgctggtgaacggtagattgctggctaagtttgctggttaaggccgtcgccgcattggtgcgcgcgagtttcagataacgcgccctatcgccgcgaggtttggtttgaacattaatcttgcgtcccgccagttcactaagggaatcggcgagcagcgttttatcgctaagattaaaatcgagcaggatctcacccggtaaggtgcgcatctggctgccttgtaaatagaactggcctacgaaggtttctaccacctcgctcagttccgtaccgccaggcactttcgggaaatagctgcggctgccgagcactttgccctgacgaatgaacaatacgtggacacaagccatgcccgcatcgaacgccacaccaataacgtcgaggtcgtcgccggtattggaaacgaattgtttttcggtgacgcgtcgcaccgcctgaatttggtcgcgaatacgtgcagcttcttcaaactccagattctggctggcagtttccatacgactaatgagttgcgtaagcacctgatcatctttgccagacaaaaacaggcgcacatactcgacctgctgagcgtattcttcttcactcaccagtccttcaacgcacggtcccagacagcgccctatctggtattgcagacacggacggctgcgattgcgataaacactattttcgcactggcgaatggggaaaatcttttgcagtagcgccagtgtttcacgtacggcatagccattcgggaacgggccgaaatattcacctttggcatgcttcgcaccacgatgcatcgccagacgcgggtgggtatcaccactcaggaagataaaaggataacttttatcatcgcgtagcaaaacgttgtaacgcggctgatagagtttgatgtagttgtgttccagcaacagcgcttcggtttctgtgtgagtaaccgttacatcaatttgctggatctgggcgaccagcgcttcggttttgcggctagcgaggttgctacggaaatagctggaaagccgttttttcaggtctttcgctttgccgacatagataaccgtaccaccagcatcgtacatgcgataaacgcctggctggctggttacggtttttaaaaacgcttttgcgtcaaactgatcactcactgactacttaatgtctccgcattacacagaccatggcgaattgccaggtgagtcagctcaacatcgccatgaatgtttagtttactgaacatacgatagcggtagctgttcaccgttttcggactgagattgagctgttcactgatctcattgaccttctggcccttggtgatcatcagcataatctgcaattcacgttcagacaaactggcaaatgggctttctgttttttctggttcgatctggcttaacgccatttgttgagcgatgtcagaagcaatgtaacgctgcccactatagacagaacgaatcgcactcacgacttcctgcggagccgcgcctttgctgaggtagcccgcagcaccggcctgcatgactttcgctggtaaagggttttctgtatggacggtaagcatgatgattttgacatcagctgtggaacgcgcgattttacgcgtcgcctcaagaccgccaatgcccggcatactcatgtccattagcaccacgtcaacggcatttgtccggcaccacttaacggcgtcttcaccgcagcttgcctcaccgacgacttttataccctttatatcttccagaatgcgtcgtatccctgcgcgcaccagttcgtggtcatcaacaagtagaacgttgatcaaaggaatatctccagaaatagggataacgctactgatagttagtcattcgtatattagcggtttttattgcaactttgaaacgttaaaaatggtgggtattcgatttttctctcgtttttgtcaattcgattgtccacagttatggtcacgcccgtcaccaacggcttaccggatcgtttcacagtaagccctacgatgaaatgtgacaaaaattgactttattcagcaaaaatgaaaatcagcccgctgaatatgtaacattaattaacccgaacaatacgggcaaaaaacattcatgataaaaatatttattggtcattatattaacgtattttatagcactgccgatatcacgctcaaaaaacaaccactgctatttttagcaaagcttatggtatactccgccgccttaacatttttcaccgcaaattttcattgcaacatgacgaggaaaataaatgagtacgcctgatttttctactgccgagaataatcaagaactggcaaatgaagtctcctgcctgaaagcgatgctgacgctgatgctgcaggcgatgggacaagctgacgcgggccgcgtgatgttaaagatggaaaaacagcttgcgctgatcgaagacgaaacccaggctgcagtattttccaaaacggttaagcaaattaaacaagcctaccgtcagtaatataaaaccggctgatagcgtgcctttcagccggtttttgcatctggcacgcaggacagaaaagagatcaaattaagccagtagcggccgcgtaacaggcaacctgggtcttatttggtgcattaatttttttctgcatgtttttctggtggaaattgaccgtattctcagagatactcaaaatcatcgctatctctgcacttgttttcccttccgccgtccacctcagaatttctttttcgcgcttgctgaaattcatctctggcgtcatcactatttcatcatttaaacgcatcagagccatcagactttcgcgcaccagtaactgcatttttaattgcagttcatcactaagaatgggtatttcgcgcgcgctgcaacgggaaaaggacaaaaagcccagcgcccggtttggcagcattaaatactgagtgacaccgcggcgtaaaccatgtgcgcgcgcggcttcccataacggctgtgcttcgctgaataagtcatcattccacattaaatggccctgactaaagttttcagggttcagcaccggatcaattgcgagaaagttttttgcctgataataactaacccacgcctcagggtaattggtgtaaaaagccactttaggtcgagtgaatggtaccgggtggcggacacataagctatagtaatcgtactccagctgctgagcctgaagctcaatttcatggtagacctcttctgcggtctccatcctctgaaaacgcaacagcatcgtgcgacgccagctgaaaaaatccttatcctgcatagtaaaccgcaacgcccttgagagtgagtatcatttataatgataattcaaactatcacataaataagatttatatataatttatattattcaggcaatgaattacttttgcaagccatcgcattctcttatgttattaatgagttatgctgatttgttaagcagttttatcaggcttgaaatggcgtccagccccgacaggtgaatcgtcggggctgattttttcttattattgcagcagaaacttctcgaggaactggcgggtgcgaggctgctcggttccgtaacgtttatcatgttatcctaaggattatccgaaaaataatacctacgaacatcttccaggatactcctgcagcgaaatatttgttttaagctcactcacatatcgcaacatttactttactttaagacaattccaggcaaattatacaacactttacgggatagtaagtccgcctgaaaaatcgcgagagtggcgcattaggtgacccatgttgttccgtttagtcatgatgaaatattcaggtaaggggaattatcgttacgcattgagtgagggtatgccatgagtacgattattatggatttatgtagttacacccgactaggtttaaccgggtatctgttgagtagaggggttaaaaaaagagaaatcaacgacattgaaaccgttgatgaccttgccatagcttgtgatagtcagcgccctagtgtggtgtttattaatgaggactgtttcatccacgatgcttctaacagtcagcgtatcaagctcatcattaatcaacatcccaatacgttatttatcgtttttatggcaattgccaatgttcattttgatgaatatctattggtcagaaaaaatttattgatcagttctaaaagcattaaaccggaatctctcgacgatatccttggcgatattctgaaaaaagagacaacgataaccagctttttaaatatgccgacgttaagtttgagccgaaccgaaagcagtatgttgcgaatgtggatggcaggtcagggaaccattcaaatctctgaccaaatgaatatcaaagccaagaccgttagtagccataaaggtaatattaaacgtaagatcaaaacgcataataaacaggttatctaccatgtcgtccgactgacggataatgtgactaatggtatttttgtcaacatgcgctaacacattctgactggtggtttcccaccagtcaggctgaataagattactctgctttctccacaaagataccgtcctgatgccctgcttcattaaagaaccagatgccgagcgggtagtcttccaggctaaccaggtacattgtgccttcactaaactcctcaactgccagtaccacgccaggacgacgcggaccgccatccgttttgactgttacccgatcattcaccttcatcgttttcctcctgtggctttgtgccagtgtagaacaatttcgtttttctggcagcgccaggcgcgcgcgagtgctgattttctcgacggtctatacttaagagatgccaggcggacttaacgactggcggcaacaacagagtaacggttgcgaggaaagatgatgaaaaccgcaaaagagtacagcgataccgcaaaacgtgaggtcagcgtcgatgtcgatgccctgctggcggcgatcaatgaaattagcgaaagcgaagttcatcgcagccagaacgattctgaacacgttagcgtcgatggacgtgaatatcatacatggcgtgaattggcggatgccttcgaactggatattcatgacttcagcgtctctgaagtgaatcgttgaatgcacaataaaaaaatcccgaccctgagggggtcgggatgaaacttgcttaagcaagaagcacttaaaaaattcgttacaccaggaaatctgatgtgttcatcaccttatccgcaatttttttcgctgacaagaaaatattcgccatatgaatgattaacgctacttatgaatagaaatgtgacgcacgtcaccccttggtggctctggcgtcagcgggatcgctcccgaaaaaatcatctttgataatttgtgcggttttgagaatcatcctggtaagaggagtactgcgcgactatgtttagtattcaacaaccactactggtttttagcgatcttgatggcaccctgctggacagtcatagttatgactggcaaccggcagccccctggctcacccgtttacgcgaagcaaatgttcccgtcattctctgtagcagtaaaacaagtgcggaaatgctgtacttgcaaaaaacgttggggctacaaggtttaccgctgattgccgaaaatggcgcagtgatccagcttgctgagcaatggcaggagatagacggttttccacgcatcatcagtggtattagccatggcgaaatcagcctggttttaaatacgctacgcgagaaagaacattttaaattcacgacttttgatgatgtcgacgatgcaaccatcgccgaatggacgggattaagccgtagccaggcggcgctgacgcagcttcatgaggcgagcgtaacgctaatctggcgcgacagtgacgagcgtatggcacaatttaccgctcgtctgaacgaactgggcttacagtttatgcagggtgcgcgcttctggcacgtactggatgcttctgccggaaaagatcaggctgccaactggattatcgcgacctatcaacaattgagtggcaaacgcccaaccacacttggcctgggcgatgggccaaacgatgcgcccttactggaggtaatggattacgcggtgattgtgaaagggctaaatcgtgaaggggtgcatctgcatgatgaggatccggcccgcgtctggcgaacgcagcgtgaaggaccggaaggatggcgtgaagggctggaccattttttctccgcccgttaagcgttatcgctcgcgaatacccgattacgcccagcctgtttagcgagataaagccgacggtcggccagactctggagttgttcaaaatcataatcaccggtttcctcgctgctgcttacccccaggctggcactgatgcgtatcgtcgtactcttggcgatcaacatctctttttcatttaatttcagtcgaatacgttctgcgacctccgcagcctccgtcagactcgcgcctggcagaatcacacaaaactcctcaccaccgacccgcccggcaacgtcctgcgcacgcaaggaactgctaattaatccggcagcatgagaaagaacacggtcgcccgcctgatgaccaaagcggtcattaatcgctttaaaatggtcaagatcgacctgaatgacagaaaaaggatgttggtgcgtctgacacaatttagcgagcggacgggctttttcgaacagtgcgccacggttatataaacgcgttaaggtgtcgtgccacgcctgccactgcaagctgctttgcagaacatacatgttgctaaccatccggcgaatcacataccaggagatgagtaacatggtggtaaagagcgcccacagcagggttaatgcaatgctgatactgccgaaatcgccgcgcacgccttcgcttaacgtatggacacgcaccagcacaccgtcgaaatggtccagacgttcccagctaacatagcgactgtccatacgaatgccgccccgcgtgtcatgttccattgcctgcgccagcaaggccagttcacgaggatcaaaaatattccctgttggatggtcaggattggaagaggtcaaaaatctcagcttactgtcatagagctgatactcaccatcgaggtttttatcgatggcgtttcttaaaaattgctgcatagtacgcacgggaatactcatccccagcacgccataccagtagttattactgtctaccggaacactgacggtaacctgcggttcagtattgctggcgtgttccggttggctagtgaaccagcgtaccgcgcggtgacgattttctcgttgactatggccaataaaccagggttgggtgacatagccgtaataacgcgttggaacattgcgcgtaaacaaggtcggctgcgtgctaacgtaaaatccggcacggctgacatacatcgcctgttcaaccatgctgctggagttgtgcgctagtcgcagcaagtaaccaacttccagtgcagcggtaatttcattgtcgaggctttcattttcgcgagacaggagattcccctcgctgactaatgcatcgctcacaccattaactggcagagtgcgtcgtcggttgagttcgattttccaggcgtgctcgtcgcgatgctgttcgaactcggttacagcatcacgcagagaggtgaaatccagtggcgctacgagagcttcgcgcatgccattacgtaaaaagatcagtttgtcgacgttatactgcaaatgcttatcgagcgcgttggcaacgttttccagatgattacgctggctggagatataggcatcttccagcaccaccacttcacgccaggtgagcaaggtggaaaaaagcaataccacgataaagcagagattaacgacatgaccaggccccaggcggcgtgcgagttttttcaaccagctctggttttccatttttgtctcgtgctgcaccctgacgactcccaacctgcttttttatgattctggcataacctggcgatagcgtaccgcaaaacagcgataattttataatggtggcatgataagacgcgactatcattcattgcaggcattagcacaccaggccggatgtgatccggcctgatgttaatgataccctttcacacttcttccgcagaacgactcccctcccccggaacaagctcggtttcatgaaaagcttcccgcttgaccccgtaaccgtcataccaacgacactcaaccataccgctggagtatccagtgacaatcatccgcgggccgccctctttaaccgtaacttcctcactaaccataaagctcatactcgcctccttttttcgagtgaaacttgttcaccttagttgaagatggcgaattttgcataatagccagtgcgagtattaatgtgcctgaccgcgcattttctctacggctttcactcccagcaccacgatgccgccgatgataaatccaagaatcagatttaaaacagtcggtaatatcatcgccactactgcactttgctgcccggcgaaatgttcaatggcgtgatgcagcggcgcaattccatgtaccacaatcccaccgccgacgaggaacatcgccagcgtgccgacaatgcttaacgctttcatcagccagggcgcgataatcaataaccctttacctaatgcctgcatcagcgcgctggatttttccgccagccaataccccaggtcatcaatcttaacgataacccctaccagaccgtagacgcccacggtcactaccagcgcgatgccactaagcaccagcacctgattaagcaacggcgcttcggccacaatccccagcgtgatggcgacgatttccgcagacaatataaaatcggtacgaatcgccccttttattttgtccttttcaaacttcagcggatcctgcgccgccagcttctccagacgctgctggctctgcgccggatcttctttatgtttacgcgcctccagcatatgcagcactttctctactccttcaaagcagagaaacgcgccaccaatcatcaacagaggcgtaatcgcccacgggataaacgcactgatgatcagcgccagcggcaccagaatcactttattaatcaggcttcctttcgccacgccccagaccacgggaagttcccggttggcccgcacgccactaacttgttgcgcattgaggcttaagtcatcccctaatacaccggcggttttcttcgccgccagtttgcccatcacggagatatcgtccagtagtgtggcgatatcatcgagcaacgtcagtaaactactcccggccaaaagcattccctctcatttttattgttgaagggtgtaagtatgaagcaaaaacggcagctctgatacttgcttcacaggtcaacatttttttaacaatcaagtgcaattatatctctcgccagcagaatgattttcacgtttactatgaaccacctttttatttccaccgtgagggattatgcgtttccgccagttgttaccgctttttggcgcgctgtttgcgttgtatatcatttggggcagtacctattttgtcattcggattggcgtggaaagctggcctccgttaatgatggcgggcgttcgattcctggcagccggtattttattgctggcatttttgctactgcgcggacacaaactccccccgctacgtccgctgctcaatgccgcgctgattggcctgttattgctggctgtcggtaatggcatggtgacggttgccgaacatcaaaatgttccttccggcatcgccgccgtagtggttgcaaccgtgcccctctttaccctgtgcttcagccgcctgtttggcattaaaacgcgcaaactggaatgggtgggtattgccattgggcttgccggaatcatcatgctcaatagcggtggaaatttaagcggcaatccgtggggcgcgattctgattttaatcggcagcattagctgggcgtttggcagtgtttatggcagccgcattaccttacctgtagggatgatggcgggtgcgattgagatgctggcggcaggcgtggtgttaatgatcgcgagcatgattgcgggtgaaaaactgacggcgctcccttcccttagtggcttccttgcggtcggctatctggcgctgtttggtagcattatcgccatcaacgcttatatgtatttaatccgtaatgtcagtccggctctcgccaccagctacgcttacgttaacccggtggtcgcggtcttgctgggtacgggactgggtggagaaacactgagcaagattgaatggctggcgctcggcgtaattgtcttcgcggtggtactggtcacgttgggaaaatatctcttcccggcaaaacccgtagttgcgccagttattcaggacgcaagtagcgagtaatcaagcgagtaaatgaatcccctgcgtgtcgatctgcgcgctggcaccttcgccgcagatccactcttccagacgctcggtaagcgcttcatccgtcagcttctcgcgcccacgtaacgcgcactcccagacaatcaatacgcgccagccgagttcctgcaagcgactgatatcgcggcgatcgcgctcaacatttttacctatcttctccagccagaactcggttcgagtcgcaggcactttaaacagatagcagtgatgatgatgccagaagcagccatgggtaaatatcacgcagcgatattcatcaacgacaaaatccggacgtccgggcagactggcgtcctgaacgcgaaatgccaggccctgcccggttaacagactggcgaggcgcttctctatcgccgtatcacgcgtggcaatcgcgcgcatatttttgctgcgagtggccttatcgtgaacgtcggccatgttgtgcctcttgctgacgcttagttatcgactacgtcggccatgttgtgcctcttgctgacgcaacgccaccgcctgtttgatttttggctcaagcagttttgccaccgcggcaaagaccggcacgaccacgctgttaccgaactggcgataggcctgagtgtcgctaaccggaatacggaatttcgcttctcccggcgcttcaaaacccattaagcgcgcgcattcccgaggcgttaaccgacgtggacgatgttgctgattcagcggatcgtcaaagtctttctcacccgtggccatatcccagccgcgatcgattaaaatttccgcgccatctttgtaataacgcgcagacagcgtacgcgtgacgctttgcggattgttcggataaaccattccataaccgaagccgttaccgcgcgcctgatgttttttcgcatatcgatagaggtacttccacagcaccggcgtcaggatatatttcgcctcgaccatcgggtccaacagctgcgccagcgtcactcgctgcgcagggaaacattcgctgatatcacgcagggtaaaatcggctttcagattcagatcgcgacgaaaacccaccagcacgatgcgttcacggtgctgcggcagaaaatgtttgccgtcgatgattttcggatcgtctggcccattatcttctgcatcagccacgtcatagcccagttcgtccagcgtctgcatgatgatgcggaacgttttaccctggtcgtgacttttcaggtttttgacgttttcgagcacaaacatcgccggacgacgcgcgtcgataatgcgtaccacatcaaaaaacagcgtgccctgggtatcgcaggcaaaaccgtgcgcccgcccgaggctgttctttttgcttacgccagccaggctaaatggctgacaagggaaaccggccagtaaaacatcgtgttcaggaatgtgttgacgaatatgttccgccgccgcctcatcactcacgccttctttatggctgagggtgatgtcgcggatatcttcattaaaatgatgcgtcgccggatcgcaataatggttggctttataagtgcgtaccgcatgtttgttccattcgctggtaaacacgcactgtccgccaatgctttcaaaaccgcgacggatgccgccaattccggcgaatagatcgataaagcgaaacgcataatgcggatgatgtgccggtggtttgggtaataacgtttgcagatgggcgaactctttctcacttaaacggtgccatgcgctgtcattcgccagcgcacgttttaaaattgccgcgctccagtgattctcacctacaccattaagctgcgccaccaacgttttaacatcataaatttgcagcagtttctccagcattgcctgtgcggcattcccggtgctgtaactatcggttacacttatattttcctgcatagatttcaccggccatctgagatggccgacaggttaacataattacagccatttagggccacgcgctcagccagcggaactaaacgcatctatcaccttgtgatcgacaccttcattctcccccgccagttcggcactgagcttcgccataaactcgactaaaaaatgcgcgttgtgctgcgccagctgcttgcctcttgcggtttgcatggtttgcggtagcttcagcaacttagtctggaaatgatccagcgcgtagcgtttatcatcaagcgggcgatgctgtgcgaacggatcttcaccatcaaacagcgccacgcccaatgccccactaacggcaaacacgcgcgccaggccaatcgcccccagggcttccagccgatccgcatcctggacaattttagcttccgttgttaagggggcgatttgcgcgctgaaactgtgagcggcaatggcatgacaaacggcctcgattttctccgccggaaattgctcgaactcttcacggagcaggcgacgcgtctcttctgccgccaggatactagaacgctgcctttgcggatgatttttcgccaggctcacaatatcgtgaaaataacaggcggttaaaatcaccagcatatcgacatcgtcatctgccgccagcttctgtgccgtagcccagacgcggcgaaaatgacacacgtcatgggccgcgtcctggtgctgatgatggtttttcaaccagttttcgaactgtgcctgccagtgttgtaagtccatacgcgctccgttgccaaagagtcgccaccttagcagtttttattcatagcgtctgctacgtgcgggacgaggtcgggtgtaccaggcaatgctgcctaacaatgccccgaccagagccataaataaaaatccgaccagtgcccctaaccactttcccgcggtagagcctaaatcgctttcaaatccgctcacgggggcatcgggaatccggctcatcacccagatgtaacgcgccattgcccagacgaaatagccacaccatgtatagaaagcccacaaagccagtttgccgccagggctgcgagagagtctctcttccatctttgtgctaccgtattccattttgagataacccggaaaattcagacttagtactattatgtgataaaagtcacatttttccacattggatgagccagtcaagactcaatcattttttgaacaaatagataaattttgcgcaacggcagtgaatacaggaaaaatcgttttgagcgattttatttatctttgatatcggctttattaattcatttaatcaatatattagcactgattacaattatacctttttattattctgtgtcatgatgcttccgttattagccttttatcgtcttgtttatattttttgggccggcatgatgccggcttttttttatgccttcattaatgtgcgcctgatcacaccagccgtttggcgcaacaatcattgataccccctatgtttccgctcaactcataacatattgatatacatttataattttcatgaatatttatatttagaattcataattatgaattatattaaatagattagaaacattttgatatcttttaaatacatttgttacatgtaatccttaaaataaaatgaacttcatagaatagtatccaaatgtgcttttttttggataacggcacttattgatatattcatgaagattataatcacaagggaatacataatgaaaagaaaagttctggcaatgctggtcccggcgttattagttgctggcgcagcaaatgcggctgaagtctataataaagatggtaataaactggatttgtacggaaaagtagtgggtctgcactacttctctgatgattctggcagcgatggcgacatgtcatatgcccgtatcggtttcaaaggtgaaactcagatcgctgatcaattcactggttatggtcagtgggaatttaacattggcgcaaacggtcctgaaagcgacaagggtaataccgcaacgcgtctggcatttgcaggtttaggctttggtcagaatggtactttcgactatggtcgtaactacggtgtcgtatatgacgtagaagcatggaccgatatgctgccagaatttggtggcgatacctatgctggcgctgacaacttcatgaacggtcgtgctaatggtgttgcaacctaccgtaacaatggcttctttggttaggtcgatggcttgaactttgctttgcaatatcagggtaataatgaaagtggtggaccattcgggcaggaaggttccggtagtggtgatggccgtagcctttccaaagaaaatggtgatggtttcggtatgtcaacatcctacgacttcgacttcggtttaagtctgggtgctgcatatcaaactctgatcgttcagatcgtcaggttggagttggtttaaatgatcgtaaccatagcaacagaaatgctggtggtgaaaccgctgaagcatggactgttggtgcaaaatatgatgctaataatgtgtatttagcagctatgtacgctgaaactcgcaatatgaccccatatggtggtggcgagtttgataatggtgaatcaagatcagccatcgctaacaaaacccaaaactttgaagttgttgctcagtatcagttcgactttggcctgcgcccgtccatcgcttacctgcaatctaaaggtaaggatttaggcggttgggctcatgacggcaacggcgacccacgttacaccaataaagatctggttaaatacgttgatattggtgcgacctactacttcaacaaaaacatgtccacctatgttgattacaaaatcaacctgctggacaacgacgatgacttctacgaagcaaacggcatcgctaccgatgatatcgttgctgtgggcttagtctaccagttctaatcagtcaactcgctgcggcgtgttactgtaaaactgaacactagcctgagttcgtccctcatcgaactcaggcttttttattggcatttcatctccatctgcggcacacgcaattgccgaagcatatcgatacagcaccttaccctgcccctcctggcacaataacatcaaccagctactcttcaagctaacacccaaatgcatttctttatgaattaatccgtaacaaacacgcttcccatatagaaatatttgcaaaaatagtgcatgaaataagctttttctctaccaatccgggatataaatattcatcagcaccacaatattccacagcactaaatctctccccgccaccccgtacctctgataatggtctaaaatcattgaagccacttgcgacgacgttgctcaataaggaaaatttggcgtgaataatattcaacaccagtgcagcatcatcattacatacttacagccgccgactaccgctttcgatatattgactcaattttccagcctggttaaaaatagcgaccagctcagtcgcaaatatagtgactaccctaactaagcaacaataaggaatacactatgactgttcaaacaagtaaaaatccgcaggtcgatattgctgaagataatgcattcttccctagtgaatatagccttagccaatataccagtcctgtctctgatcttgatggcgtggactatccaaaaccttatcgcggtaaacataaaattctggtgatcgccgcggacgaacgttatttgccgaccgataacggaaaactgttcagcaccggtaaccatccgattgaaacgttgctgccgttgtatcatctccatgctgcaggtttcgaattcgaagtggcgaccatttccggtctgatgaccaagtttgaatactgggctatgccgcacaaagatgaaaaagtaatgccattctttgagcagcataaaagcttgttccgcaatccgaagaaactcgcggatgttgttgccagcctcaacgctgatagcgaatatgcagcaatctttgttcctggtggtcatggcgcacttattggtttacctgaaagccaggacgtggctgccgctttacagtgggcaatcaaaaatgaccgttttgttatctccctttgccacggcccggcggcttttctggcgcttcgccacggcgataacccactgaatggttattccatttgcgcattcccagacgccgcagacaaacaaacgccagagattggctatatgccgggtcatctcacctggtacttcggcgaagaactgaagaaaatgggcatgaatatcattaatgacgacatcaccgggcgagtacataaggaccgtaaacttctcaccggcgacagtccttttgcagcgaatgcgttgggtaaactggcggcgcaggaaatgctggcagcttacgcgggttaatccctgttacgtttgaatgtaagcgcataatcaatcgcggccgcgttagtactcacgacgtggctgcgttttttcacggttaatttatggcgtactgaagccctatgttaatttctttgcggtaacgtaatccggaacacattatgcttattgagatagtgatacgtagcacttcccccatgcaattcggcaatcgctttgactaaagaaaggcctagtccctgacctacggaatgacggctattatctccccgccaaaatctacggaagagtttttcaggctcattaattttcgttccagggctggcgatatcaatattaagatagctgttggtatcaagaaaactggttatatgaatacggcttttttctgggctatatctaatggcattaacaataagattgcttaacattcgttgtagtaaaattttatccgcaaagatttgctgattgcactcgaccttaaagcaaatctctttctcgtcactaaggtattcaagatagtccaacaaattttcgacttccttattgagagaaaggctgtccagtttcaccaaaacattgtttttatctgccctggcaagaaacagtatgttctctgttaaccggctaatattttccagctcttcaatgtttccggcaattgttttttgatattcagcgatacttctggtttgactgagcgtaacctgattctgacccagtaatgcattaattggcgttctaagttcatgagcgagatcgtcagcaaactgacttagacgctcaaaatctttgactaaagcatgatgcattttattcaacgcctgcccaagaggttttagttctctcggtaatgcgctaacctcaacaggctctcggctatcgttataattcagcgcttccgttacaccactcaactttttgatctctcgtaatcccgttctgattaacagcggacttaatacactgcaaagtacaatggcgacaatgcaaattataatgctattaattttatactgttcaagcatgttatgtctggcactagccaatttagccacagtaaccgttaaacttgggctaacttcatcaatattaattcgtaaagcatctatctctgtatcattaataatgcttctgtaaatgccagctgcgctgattgtctcactagcaggtatgttatttaacatgccatcactgacatttgtccggttaacaattttattgatgctatcaccatgaataatcaagatatcctgactaacatccatcatccggttaaagtacacaggtaacgtatctggatttaccccatcaattaacaactgcttgatctgcgctgtccggttaatgagtgttgtatcatcgcgccatttcaactcacttgccaggccattatagagagtccagacaattccggcgccagcaacagacagtagcaatataaaaagcaaggttaaacggacggttatagatagtcttttcattatttttttaccgctacgaaactatagcccatcccccggattgtggcaattagcttttcaggaaaaggatcatcaacttttgcgcggagcctgcgaatggcgacgtccaccgtattggtatcactatcaaagttgattccccaaatttcactcgcaataaccgttctgggtataatttcgccagctctggaggccagtagccaaagtaactgaaactccttgcgcgtcagtgtaatactgatattgtccctgctcacactatgactaacagagtccattcttaagccgctgatttctaatgtactattcaaagcgtgatgttgccttaattgtgcccgaacccttgccagcaactcagaaaaactaaaaggttttaccagataatcatttgccccactgtccagccctctgactctgtcatcgacagaatcccttgcagtaaggcaaataacaggggtttgctttgctgttcttaacgtttgtaagatctgccagccatccatacccggaagcataatatccagaatgatcaatgcataatcatccttcagcgcaagataaagcccatctctgccatcagaaacggcatcgatgacataacccgcttcggaaagcccctgcgttacccattcctgggtcctttgattatcttcaataagtagaatcttcatgaaaataatatgccataaatcatatgttatagaaacagcctggttcattacaaaattgtaatgctgctgtaaggttaccctggacgctttttcgctatcctcaaaactcattcacatgacaaggatataaacatgttaaagcgttatttagtactcagcgtagcaacggcagcatttagtttaccttctttggttaatgccgcacaacaaaacattcttagcgtgcacattttgaaccagcaaacaggaaaacccgctgctgacgtgacagtcactcttgaaaagaaggcggataacggctggttacaacttaataccgccaaaacagataaggatggacgaattaaggcactgtggcccgagcaaactgcaactacgggcgattaccgtgtcgtatttaaaaccggggactatttcaagaaacaaaatcttgaaagtttcttccctgagatccccgttgaatttcatattaataaagtgaacgagcattatcatgtgcctttattacttagccaatatgggtatagtacctatcgtggcagttaatgcataaatatgtaaaagcagatctctgctactgttagggaggacactccctgacagattaacagtaaacggctcttgctggctaacgacaaaaaagtgtgatggcttatgaaaaagaatcaatttttaaaagaaagtgatgttacggccgagagcgtattctttatgaagcgtcggcaggtgttaaaagcactgggcatcagtgcaactgcactttctttgcctcacgctgcgcatgccgatctgcttagctggtttaaagggaacgatcgcccgcccgcccccgccggaaaagcgctggagttcagcaagcctgccgcctggcaaaataacctgccactgacgccagcagataaagtttccggttataataacttctatgaattcgggctggataaagccgatcccgccgctaatgctggtagcctgaaaaccgatccatggacactgaaaatcagcggcgaagtggcaaaaccattgaccctcgatcatgatgacttaacccgtcgcttcccgctggaagagcgtatttatcgtatgcgctgcgtggaagcgtggagcatggtggtgccgtggattggttttccgctgcacaaattgctggcgcttgccgaacctaccagcaatgcgaagtatgtcgctttcgaaacaatttatgcaccggaacagatgccaggccagcaggaccgctttatcggcggtgggctgaaatatccttatgtcgaaggattgcgtctcgacgaagcaatgcatccgctcacactgatgaccgtaggtgtttatggcaaggcgttaccgccacaaaatggcgcgccggtgcgactgattgtgccgtggaaatatggctttaaagggattaaaagcatagtcagtattaagctgacccgcgagcgtccgccaaccacctggaatctggcagcgcctgacgaatacggtttttacgccaacgttaatccgtatgttgatcacccgcgctggagtcaggctaccgaacgatttattggtagtggcggcatcctcgatgtacagcgccagccaacgctactgtttaatggttacgccgcccaggtggcaagcctgtatcgtggcctggatttgcgggagaatttctaaatgcgtctgacagcaaaacaggtgacatggctgaaagtttgcctgcatcttgccggattgttgccgtttctctggctggtctgggcgatcaatcacggtggactgggtgccgatccggtgaaagatattcagcattttactggtcgcactgcactgaaatttttgctggcgaccttgttaatcacccctctggcacgctacgcaaaacagccgttattgatacgcactcgccgcctgttaggattatggtgctttgcctgggcgacactgcatttaacaagttacgcattgctggagctgggcgtgaataatctggcgttattaggtaaggagttaattacccggccttatttaacgttaggtattatcagctgggtaattttgcttgctttagcgttcactagtacccaggcgatgcagcgaaaactcggcaagcactggcaacagttgcataatttcgtctatcttgtcgcgattctggccccaatacattatctgtggtccgtgaagattattagtccgcagccgctcatctacgctgggctggctgtactgcttttagccttacggtataagaagttgcgttccctttttaaccggttacgcaagcaggttcacaacaaattatctgtataacttcatattgccgacaaagtacgcgttatccctgccggatgtggcgcgagcgccctatccggcatacacagatcgcatcaggttatgtttcgtttgtcatcaacctcaaatcaccaaaataatttattttatttcaataagatagataagtagaactgagaaagccatgctctcgtttcctaagagttgttgcattttgctatatgttacaatataacattacacatcatatacattaactctggaggaaactgttttggcgattcgtctttacaaactggctgttgctttaggtgtctttattgttagcgctcctgcctttagccatggtcatcacagtcacggcaaacccttaacagaggtcgaacaaaaagctgctaatggtgtttttgatgatgccaatgtacaaaaccgaacgctcagtgactgggatggagtctggcaatccgtttatcctttactgcaaagtggcaaacttgaccccgtctttcagaagaaagcggatgcagataaaactaaaacatttgctgaaattaaagattattatcacaaaggttatgcaacagatatcgagatgattggcattgaggacggcattgttgaattccatagaaataatgaaacaacaagctgtaaatatgattacgatggatacaaaatactcacctataaaagtggcaagaaaggcgttcgttacttattcgaatgtaaagatcctgaaagcaaagcccctaaatatatacaatttagcgatcatataattgcaccacgaaaaagttctcattttcacatttttatgggtaatgatagtcagcaatctttattaaatgaaatggaaaactggccaacgtattatccatatcagttgagtagcgaagaagtggtcgaggaaatgatgtctcattgagtattctcatgataacgcctcgatgccgctttagtaagttatcataactgccactggtccatccacaaacgccactgaacgcaagctagctacagacacgctcatcactatgacgtgtctgtatattaataagctaacccgcattgagttaaccaataacggattccatacacaatacggccaacagagaaagatacctgtgctcacgccattgcttatattggctggttacaatatgcactatcaattttttaaataacaaattattaaaaccacatctgtataaggaatttttaaggttcgtgggatagcttgactgtgaaaatcacaggagctacaaaaatgaaccgattcagtaaaactcaaatttatttacattggataacgctgcttttcgttgcaataacctatgccgcgatggaactccgtggctggtttcctaaaggtagtagtacttatctgctgatgcgagaaacacattacaatgcgggtatattcgtttgggtgttaatgtttagtcgcctgattataaaacaccgttatagtgatccttctattgtgccaccgccacctgcctggcaaatgaaagcggctagcctaatgcacatcatgctttatataaccttccttgcacttcctctgctggggattgctttgatggcttacagtggaaaaagctggagtttccttggtttcaatgtgtctccctttgttaccccaaacagcgaaattaaagcactgataaaaaatattcacgaaacctgggcaaatataggctactttttaatcgcagctcacgctggcgcagcactctttcatcactacattcagaaagataatactctgttacgaatgatgcctcgccgcaaataagtcgatccccttacaaggaaatgtgaaccatggacatcaacgcgtcataaatgtttacgcaagtgcacaatgcaccctttccactatcaacaaggaggagcagaaactgtgtaaatcgtacaatggtaagacttatcaaaaatacaggttaattttggtatttaaaccttttttacttgttagtatgatacaaaggctttcaaaaaagctgcgaaattcaacaactcttggaaattatggactttgtcccgcggctttaatctgacggccgcgttccttttttgactcaattattgaacccttctctacgcaacttcagttcccaccaccaactttgcggcagtttcataggatgaatgtctaaaagaataatggtgagcgataagaaaacgactgaataactgcacattttcgctcgaaagcttcctgtcagatccatagcgaatcaagtgctgaatgtcacagtatcgaacagaaaacagtgacgatctaacccttcaagaatattctacgattgttctgtttaggaaaagcaaggcgggaagtcgggagataagtcattgataaagtggcggagagagggggatttgaacccccggtagagttgcccctactccggttttcgagaccggtccgttcagccgctccggcatctctccgttcagatggttgccatgatgccaggaaatttggcattttaacagtccctgtccgtgcaattttgttcaagtgacgagtttgcgagcaaaacgatgattaagtggccctggaaagtacaagaaagtgcacatcaaactgcccttccctggcaggaagcactaagcatcccccttttaacgtgtctgacggaacaggaacaaagcaaattagtcactcttgccgaacgttttttacagcaaaagcggcttgttcctttacagggctttgaactggatagtttaagaagctgccggatagcacttctattttgcctacccgttctggagttaggactggaatggctggatggttttcatgaagtcttaatttatcctgcgccatttgtggtcgatgatgaatgggaagacgatatcggtctggtgcataaccaacgtattgttcagagtggtcagagctggcagcaagggcctatcgttttgaactggttggatatacaagattcttttgatgcttctggttttaacctgattattcatgaagtcgctcataagctggacacccgtaacggcgatcgcgccagcggagttccctttattccgttgcgtgaggttgctggctgggaacacgatcttcatgctgcaatgaacaacattcaggaagaaatcgaattggttggcgagaatgcggcgagcattgatgcttatgcagccagcgatcctgctgaatgttttgccgtactttctgaatatttctttagcgccccagaactttttgctcctcgtttccctagtttgtggcaacgtttctgccaattttatcaacaagatcctttgcagagactgcatcacgctaatgatacagacagctttagcgcgacgaatgttcattaattaacaactttgcagattaattaaccaattgaaatgacttatgaaatttagtgttgacagacaaggtaccgctaagtaatattcgccccgttcacacgattcctctgtagttcagtcggtagaacggcggactgttaatccgtatgtcactggttcgagtccagtcagaggagccaaattctaaaaattcgcttttttagcgcaatgtcactgaccttagttgaacattgttttttaacggatagcgggtttttaacatcttaagcgccctcgacctttatggttgagggcgttttgctatgaacgccatcaccattttcccctcgattataaaacttgagttattcagtagtctcccctcttgcaactcacacccaaaactgcctaacgaaaagttattaattttcaatcatattgctatcagtatttacattttttcgctgtgctagaaagggcgcatttatgttagctcgtagtgggaaggtaagcatggctacgaagaagagaagtggagaagaaataaatgaccgacaaatattatgcgggatgggaattaaactacgccgcttaactgcgggtatctgtctgataactcaacttgcgttccctatggctgcggcagcacaaggtgtggtaaacgccgcaacccaacaaccagttcctgcacaaattgccattgcaaatgccaatacggtgccctacacccttggagcgttggaaagcgcccaaagcgttgccgaacgtttcggtattagcgtggctgagttacgcaaactcaaccagtttcgtacgtttgctcgaggttttgataatgtccgccagggtgatgaactggatgtcccggcacaagttagtgaaaaaaaattaaccccgccgccgggtaatagcagtgacaacctcgagcaacagatagccagtactagtcagcaaatcgggtctctgctcgccgaagatatgaacagcgagcaagcggcaaatatggcgcgtggatgggcctcttctcaggctagtggcgcaatgacagactggttaagccgcttcggtaccgcaagaatcacgctgggcgtggatgaagattttagcctgaagaactcccagttcgattttctccatccgtggtatgaaacgcctgataatctctttttcagtcagcatactctccatcgtactgacgagcgtacgcagattaacaacggcttaggttggcgtcatttcactcccacatggatgagcggcatcaacttctttttcgaccacgatcttagccgttaccactcccgcgccggcattggcgcggagtactggcgcgactatctaaaattaagcagtaacggctatttgcgactgaccaactggcgcagcgcacctgaactggacaacgattatgaagcacgcccggccaatggctgggatgtacgcgcagaaagctggctacccgcctggccgcaccttggcggtaaactggtctatgaacagtattatggcgatgaagtggccctgttcgataaagacgatcggcaaagtaatcctcatgccataaccgctggacttaactatacccccttcccgctgatgaccttcagcgcggagcaacgccagggtaaacagggcgaaaatgacacccgttttgccgtcgattttacctggcaacctggcagcgcaatgcagaaacagcttgacccgaatgaagtcgctgcacggcgtagccttgcaggcagccgttatgatctggtggatcgcaacaacaatatcgttctggaatatcgcaaaaaagaactggttcgcctgaccctgacagaccccgtgacagggaagagtggagaagtgaaaagtctggttagcagcctacaaaccaaatatgccctgaaaggctataacgtcgaagccaccgcactggaagctgccggtggcaaagtggtcacaacgggtaaagatattctggttaccctgccggcttaccggttcaccagtacgccagaaaccgataacacctggccgattgaagtcaccgccgaagatgtcaaaggcaatttgagcaatcgtgaacagagcatggtggtcgttcaggcacctacgctaagccagaaagattccagcgtaagcttaagtacccaaacattgaacgcggattcccatagtaccgccacactgacttttattgcgcatgatgcagcaggtaatcctgttgtcgggctggtgctcagcacgcgtcacgaaggtgttcaggacatcaccctttctgactggaaagataatggtgacggaagctatacccagatcctgaccacaggagcgatgtctggcacgctgacgctgatgccacagctgaatggtgtggatgcggctaaagcccccgccgtggtgaatatcatttctgttagcagttcccgaactcacagcagtattaagattgataaggaccgttatctctccggcaatcctatcgaggtgacggtagaactgagagatgaaaatgacaaacctgttaaggaacaaaaacagcaactgaataacgcagtcagcatcgacaacgtgaaaccaggagtcactacagactggaaagaaaccgcagatggcgtctataaggcgacctataccgcctataccaaaggcagtggacttactgcgaagctattaatgcaaaactggaatgaagatttgcataccgctggatttatcatcgacgccaacccgcagagtgcgaaaattgcgacattatctgccagcaataatggtgtgctcgccaatgagaatgcagcaaacaccgtcagcgtcaatgtcgctgatgaaggaagcaacccaatcaatgatcataccgtcacgtttgcggtattaagcggaagcgcaacttccttcaacaatcaaaacaccgcaaaaacggatgttaatggtctggcgacttttgatctgaaaagtagtaagcaggaagacaacacggttgaagtcacccttgaaaatggcgtgaaacaaacgttaatcgtcagttttgtcggcgacagcagtactgcgcaggttgatctgcagaagagcaaaaatgaagtggttgctgacggcaatgacagcgtcacaatgaccgcgaccgtccgggatgcaaaaggcaacctgctcaatgacgtcatggtcactttcaatgttaatagtgcagaggcgaaactgagccaaaccgaagtgaatagccacgacgggatcgccacagctacgctgaccagtttgaaaaatggtgattatagggttacggcctctgtgagctctggttcccaggctaatcaacaggtgaattttatcggtgatcaaagtactgctgccctgaccctcagtgtgcctagtggtgatatcaccgtcaccaacacagctccgcaatatatgactgcaaccttgcaggataaaaatggcaacccactaaaagataaagaaatcaccttctctgtgccaaacgacgtcgcaagtaagttcagcattagcaacggaggaaaaggcatgacggatagtaacggggttgcaatcgcctccctgaccggcacgttagcgggcacgcatatgatcatggctcgtctggctaacagcaatgtcagcgatgcacagccaatgacgtttgtggcggataaagacagagcggttgtcgttttgcaaacaagcaaagcggaaatcattgggaatggcgtggatgagacaactctgacagcaacagtgaaagatccgagcaatcatccggtggcggggataacggtaaacttcaccatgccacaggacgttgcggcaaactttacccttgaaaataacggtattgccatcactcaggccaatggggaagcgcatgtcacgctgaaaggtaaaaaagcgggcacgcatacggttaccgcaacgctgggtaataacaataccagtgatagccagccggtaacatttgtggcggacaaagccagcgctcaggttgtcctgcagataagtaaagatgagatcacaggtaatggcgtcgatagcgcaacgctaactgcaacggttaaagatcagttcgacaatgaggtgaataatcttccggtaacattcagcagtgcctctagtggactcaccctgaccccgggagtaagtaataccaacgagtctggcatcgcgcaggccactctcgcaggcgttgcctttggtgagaagacggttactgcaagtctggctaataatggtgccagcgacaacaaaactgtgcattttattggcgacacagcggcggcaaaaattatcgagttggcgcctgtcccagacagcataatcgccggtaccccgcagaacagctccggcagcgtcatcaccgccacagtcgttgataataatggctttccggtgaaaggtgtgactgtgaacttcaccagcaacgcagcgacagccgaaatgacgaacggcggtcaagccgtgacgaacgaacagggtaaggctaccgtcacttataccaatacccgctccagcatagaaagtggagcgagaccggataccgttgaggccagtctggaaaatggtagctccacgcttagcacaagtattaatgtcaacgctgatgcgtctacggcacatctcaccttgctacaggcactttttgatacagtctccgcaggcgagacaaccagtctgtatattgaggtgaaggataattacggcaacggtgtcccccagcaggaggtaaccctcagcgttagtccaagtgaaggcgtgacccccagtaataacgctatatatactaccaaccacgacggcaatttttacgcaagctttaccgctacaaaagccggggtttatcaattgacggcaaccctcgaaaatggcgatagcatgcaacaaacagtgacctatgtgccgaacgtcgcgaatgctgaaatcacgctggcagccagcaaggatccggtgattgccgacaataacgatctcacgacactaacagcaacagtcgctgatacagagggcaatgcgatagccaacactgaggtaacatttactctgccggaagatgtgaaggcgaacttcacgctgagcgatggcggtaaagtgattactgatgctgaaggcaaagcgaaagtcacgctgaaaggtacaaaagcaggcgctcatactgttacagcaagcatgactggcggtaagagtgagcagttggtggtgaactttattgcggatacgctcactgcgcaggttaatcttaacgttaccgaggacaattttatcgctaataacgtcgggatgaccaggctgcaggcaacagtgactgatggaaacggcaacccgttagccaatgaggcggtgacattcacgctaccggcagatgtgagcgcaagctttactctcggacaaggcggttccgccattactgatatcaacggcaaggctgaagttacactgagcggtacaaaatccggcacctaccccgtgacagttagcgtgaacaattatggtgtcagtgatacgaaacaggtgactttgattgccgatgctggtaccgcaaaactagcctccttaacctctgtatacagtttcgtcgtcagcacgaccgagggcgcaaccatgacggcaagcgtcactgacgctaacggcaacccggtagaaggcataaaagttaatttccgcggaacctccgtcacgctaagcagcaccagcgttgaaacggatgatcggggtttcgctgaaattcttgtgacaagcaccgaggtcggactgaaaacagttagtgcctctctggcagataaacctactgaagtcatcagccgattactgaatgccagtgcagatgttaattctgcgacgattaccagtctggagataccggaaggtcaggtaatggtcgcacaagacgtagcagttaaagctcacgttaacgaccagtttggcaacccggttgcgcatcaacccgtgacattcagtgcagagccatccagccaaatgatcatcagccagaatacggtctctactaatacgcagggtgtagccgaggtcaccatgacgcccgaaagaaacggtagctatatggtgaaagcatccctgccgaatggagccagtcttgagaaacaactggaggctattgatgaaaaactgacactcacggcgtccagtccgcttatcggtgtctatgcccctacaggcgctactctgacggcaacgctaacctctgcaaatggcactccagtggagggtcaggtcatcaactttagcgtaacgccagaaggggcgacgttaagtggcggaaaagtgagaactaactctagtggtcaggctccagtcgttttgaccagcaataaagtcggtacatatacggtgactgcatctttccataacggcgtaacaatacagacacagacaaccgtgaaagtcactggcaacagtagcaccgcccatgttgctagctttatcgctgatccaagcactatcgccgccaccaacactgatttaagtaccttaaaggcaacggttgaggatggcagtggtaacctgatcgaaggtctcactgtgtacttcgccttaaaaagcggctctgccacattaacgagtttaacagcggtgaccgatcaaaacggaatcgcgacaacaagcgtgaaaggagcgatgacaggtagcgtcacggtaagcgcagtcacgaccgctggtggaatgcaaacagtagatataacgctggtggctggcccggcagacaccagccagtccgtccttaagagcaatcggagtagtctgaaaggggactataccgatagtgctgaattacgtcttgttctgcacgatataagtggcaatccgatcaaagtttctgaagggatggaatttgtgcaaagtggtactaacgtgccctatataaaaattagcgcaattgattacagtctaaatatcaacggtgattacaaagccactgttacaggaggcggagagggtatcgcaacgctgatccctgtattgaatggtgttcatcaagctggtctgagtaccacaatacaattcactcgcgcagaagacaaaataatgagcggtacagtaagtgtcaatggtactgacctaccgacaactacattccctagccaggggttcaccggggcgtattatcagttgaataatgacaactttgccccaggaaaaacggcggctgattatgagtttagtagctctgcctcctgggtcgatgttgatgctaccggtaaagtgacatttaaaaatgtcggcagcaatagcgaaaggattacggcgacgccaaaaagtggaggccctagctatgtatacgaaatccgtgtgaagagttggtgggtgaacgccggcgaggctttcatgatatacagccttgctgaaaatttttgcagcagcaatggctacacgctccccagagcaaactatttaaaccactgtagttcccgaggcatcgggagtctgtacagtgaatggggagatatggggcattacacgactgacgctggttttcaaagtaatatgtattggagttctagtcccgcaaacagtagcgaacaatacgtagtttccctggcaacaggtgatcaaagcgtatttgaaaagcttgggtttgcttatgcgacatgttataaaaacctgtgattttccgttataatttcttaaagagtgttccattcggggcactcttttttacattccctctacagaactagcccttctctcacagaaaatgaataaataaaaatgcggcaccgccagaatcgcgttcgatgtgactatgatcattttcggtgagtactgctttgatctaaaggctggttttctgtgatgattgaccagcctcagagtattgatgacaccaccgttcataacagatcggcattactatgcataagtactgtctcatattctcgccaaaacactttttaatgcctttgcgaattcatccagacttatattgtcaattttttgcccaacgacgactgactccgagacatcggccattgcgggccatcgcgttttgtaatcagcataaattgcaacaacaggggtattataggcacttgccatatgtaatattgaggtgtcaggagttattgcgatataagcatcttttatgattgctgctgaacgtttaatcgagggtggtaaggataaacggtagacattattataacaatccactaatgccctggctttatcttcacctttgggtccatgaacgatcactattggtatatctgtttcactttaaatttttgctattagattttctgcaatcgataatgaaaatgtacgttcctgcgagctaccttctaaattgaacgcaatgtaagatcctaacgatcgcatttcctcgcgcacctcatcgagtacatcctcacttagtggcaattcatatattggcctgactgctggaaaacccgcctcacgcatcataaatgcccatgtcataggtacgggagcccggagtttctgatccatactggacgcgttcttgcacaaaggggagaagcaattcatggttataccaacaacctgaaaattcgtttttgctttcaactgactgataaataacatcgttttcaggttctttttacgcatcccctcaatgcaaagatccggcgtaccgtattgctgtgttatgttctttgctaaatcttttatttcttttaatgttgcgtgatcctgcatagtcattgtgactaatgttaatttagtctgttcaagtttaagcgcattaaagacttctaaattaattgtcgacgttacaattaaaagatgcttaattttatgcaattcaagcgcccgaataacaggaaagatggccatagcatcgccaatctgatcgggaatatggatgacaacaaagtctgttttttcaatattgaaattataagctttataatcgtagtaactaaatgcaatacgtctcaacaatgatgctaaaaacatacctaacctcgcctccctactggttataatgcaatgcagtctatcagactcatcagggtgccattttgtgcatatgcggacttttatgtttcatatctctaacctgtgggtcctctgcttaatccttaaacaacaccagcaactcctgcgctttcatcttccatcgaatttttcatgttgccgctaatcagccataaaatcatttgcagatgcgctctgtcgaggtagtctcataaggttcgtttatagatcgacggcaatgtgagttaccttttccatactaattataaaaagacagtacaaacaggatcattatggactccacgctcatctccactcgtcccgatgaagggacgcttagcttaagtcgcgcccgacgagctgcgttaggcagcttcgctggtgccgtcgtcgactggtatgattttttactctatggcatcaccgccgcactggtgtttaatcgcgagtttttcccgcaagtaagcccggcgatgggaacgctcgccgcatttgctacctttggcgtcggatttcttttccgtccgctcggcggtgtcattttcggtcactttggcgaccgactgggacgtaagcgcatgttaatgctgaccgtctggatgatgggcatcgcgacagccttgattggtattcttcctagtttcagcaccattgggtggtgggcacctattttgctggtgacactgcgtgccattcagggatttgcagtcggcggcgaatggggaggcgcggcgttgctttccgttgaaagtgcaccgaaaaataaaaaagccttttacagtagcggtgtacaagttggctacggtgtaggtttactgcttagtaccggactggttagtttgatcagtatgatgacgactgacgaacagtttttaagctggggctggcgcattcctttcctgtttagcatcgtactggtactgggagcattgtgggtgcgcaatggcatggaggagtccgcggaatttgaacaacagcaacattatcaagctgccgcgaaaaaacgcatcccggttatcgaagcgctgttacgacatcccggtgctttcctgaagattattgcgctacgactgtgcgaattgctgacgatgtacatcgttactgcctttgcacttaattatagtacccagaatatggggctaccgcgcgaacttttccttaatattggtttgctggtaggtggattaagctgcctgacaattccctgttttgcctggcttgccgatcgttttggtcgccgtagggtttatatcacaggtacgttaatcggaacgttgagcgcatttcctttctttatggcgcttgaagcacaatctattttctggatagttttcttctccataatgctggcaaacattgcgcatgacatggtggtgtgtgtgcaacaaccgatgtttaccgaaatgtttggtgccagttatcgctatagtggcgctggagtcggttatcaggttgccagtgtggttggcggtggatttacaccttttattgccgctgcactcatcacttactttgccgggaactggcatagcgtcgccatttatttgctggctggatgcctgatttccgcaatgaccgctttgttgatgaaagacagtcaacgcgcttgatagcctggcgaagatcatccgatcttcgccttacacttttgtttcacatttctgtgacatactatcggatgtgcggtaattgtatggaacaggagacacacatgaataataagggctccggtctgaccccagctcaggcactggataaactcgacgcgctgtatgagcaatctgtagtcgcattacgcaacgccattggcaactatattacaagtggcgaattacctgatgaaaacgcccgcaaacaaggtctttttgtctatccaagtctgaccgtaacctgggacggtagcacaaccaatccccccaaaacgcgcgcatttggtcgctttacccacgcaggcagctacaccaccacgattactcgccctactctctttcgtagctatcttaatgaacaacttacgttgctgtatcaggattatggtgcgcatatcagtgtgcaacccagccagcatgaaatcccttatccttatgtcatcgatggctctgaattgacacttgatcgcagtatgagcgctgggttaactcgctacttcccgacaacagaactggcgcaaattggcgatgaaactgcagacggcatttatcatccaactgaattctccccgctaagccattttgatgcgcgccgcgtcgatttttccctcgcacggttgcgccattataccggtacgccagttgaacattttcagccgttcgtcttgtttaccaactacacacgttatgtggatgaattcgttcgttggggatgcagccagatcctcgatcctgatagtccctacattgccctttcttgtgctggcgggaactggatcaccgccgaaaccgaagcgccagaagaagccatttccgaccttgcatggaaaaaacatcagatgccagcatggcatttaattaccgccgatggtcagggtattactctggtgaatattggcgtgggaccgagtaatgctaaaaccatctgcgatcatctggcagtgctacgcccggatgtctggttgatgattggtcactgtggcggattacgtgaaagtcaggccattggcgattatgtacttgcacacgcttatttacgcgatgaccacgttcttgatgcggttctgccgcccgatattcctattccgagcattgctgaagtgcaacgtgcgctttatgacgccaccaagctggtgagcggcaggcccggtgaggaagtcaaacagcggctacgtactggtactgtggtaaccacagatgacaggaactgggaattacgttacagtgcttctgcacttcgttttaacttaagccgggccgtagcaattgatatggaaagtgcaaccattgccgcgcaaggatatcgtttccgcgtgccatacgggacactactgtgtgttagtgataaaccgttgcatggcgagattaaacttcccggccaggctaaccgtttttatgaaggcgctatttccgaacatctgcaaattggcattcgggcgatcgatttgctgcgcgcagaaggcgaccgactgcatagccgtaaattacgaacctttaatgagccgccgttccgataataagttctgaaccttcttatcagaaatagatgtgaaggagtaagtaagacacctggcaaatagcctgcaataatcgtgggctgtttgcttccttgggcggatacgagttttattatcgtcttaatgatttccacatattaaaagcaagtatgctttcaaaacacaattataaaaaatcccgccaacaatataagtttttataaaattaaatataagattatggctttagaatatttttatttctaatagacgagatttttcctgttatgatataatatgctgaattaacacatgttaacgatttaccagtaatgtaaataaattttcgaggagatcattccagtgggacgtaaatgggccaatattgttgctaaaaaaacggctaaagacggtgcaacgtctaaaatttatgcaaaattcggtgtagaaatctatgctgctgctaaacaaggtgaacccgatccagaattaaacacatctttaaaattcgttattgaacgtgcaaagcaggcacaagttccaaagcacgttattgataaagcaattgataaagccaaaggcggcggagatgaaacgttcgtgcagggacgttatgaaggctttggtcctaatggcagtatgattatcgccgagacattgactagtaatgttaaccgtacgattgctaacgttcgcacaattttcaataaaaaaggcggcaatatcggagcggcaggttctgtcagctatatgtttgacaatacgggtgtgattgtatttaaagggacagaccctgaccatatttttgaaattttacttgaagctgaagttgatgttcgtgatgtgactgaagaagaaggtaacattgttatttatactgaacctactgaccttcataaaggaatcgcggctctaaaagcagctggaatcactgagttcagtacaacagaattagaaatgattgctcaatctgaagttgagctttccccagaagatttagaaatctttgaagggcttgttgatgcccttgaagatgacgacgatgtacaaaaagtttatcataacgtcgcaaatctctaattatcttttaaagaaatctgtctttacggcagatttctttaatctcatataattcttataaaaaatataatattcaactcgtcatattgattatacccccccgttcccagagaaataatatttattaaaattccagttcttctttttctgattacagaaggcaaagtggcaattacgcatagtttcccgataaagacgcgatagcgacatcccgcataaggcatttttctctttatctttgtacggtacttcatggaacagagtttttgaccttgcgaatcgtgatgtctgttggggagggacaatttgctcactgaagcgtgagactcgattaagcgcacgaaacacagaaatcaaaaaacccggtcacttttttacaaggtaaccgggtaaaaataatttttattttttaactgttttgagactcatagagatgtctcaaaactaaaatttggctcctctgactggactcgaaccagtgacatacggattaacagtccgccgttctaccgactgaactacagaggaatcgtgagaacgaggcgaatattagcgatgcccacccacaatgtcaaagcctgttttttaaatttgaaatcgtttgctgaaataatctgcattttgtcgtttattcgctcacaactggctttttttcacacttttgcggctcgggtcgagggtatttccatagccaacgtccagtaaccattcgccagtaaaacagcacggcccgcacagcccagtcggcaaacattcccatccagacaccaaccacaccccagccaagcatgattcccagcacataaccgactacaacccgacaaccccacatgctcaacatgctaacccacatggcgtaacgggcatcacgagcacctttaaatccagcgggtagcacccaactggcggaccaaataggcataaataaagcatttagccaaatcagaatcacaacgacatgtttaacctgtggatcctgggtgtaaaagcttgccataaccccggcaaagggagccgttagccaggcgatggccgttaatccaagagtggaaagccagaacacatgccgcaactgaatctctgcttgcgctatctgccctacccccaaccttcggcctgtaatgatcgtagaagcagagccgagcgcacttccgggtaagttgataagagccgcaatactaaacgcgataaaatttccggcaataacactggtccccatcccggcaacgaacatttgggttaataaccgaccactggtaaataacacactttcgacactcgcgggaataccaatccccatgacttcccagataatgctaaaattcagcggtttaaaatagctctttaagctaatccttagcgcaggattaaaaccaatcgccagcacccacaaaattgcaactgcgccaatataacgagaaatggttaaacccagccctgccccgacaaatcccagtcccggccaggagaaaaggccgtaaatcaatatgccgctaataataatattaagaatattcaggctaccgttaatcaatagcggtattttcgtattccctgcaccacgaagtgccccgctaccaataagagtgatggcagctgctggataactgagtaccgtcagctccagataagtcaacgccagtgctttaacttctgtcgtggcatcacccgcgacgaaatcaataatttgttcgccaaaatgatgaataagcgttgccaacagtacggcaaacaacgtcatgatcaccaaactctgccgcgtcgccaccctcgctcgtcgtcgatcccgcttaccgagactaaatgccacaacgacagtagtaccaagatcgatagcagcaaaaaaagccataatgaccatattgaagctgtccgccaatcccacgccggccatcgcatcttttcccagccagctgaccagaaaagtgctcagaacccccatcaacaggacacaggcattctccatgaagataggaacagcaagcggggttatctcgcgccagaacaacactttgtagctcttgcgtttagcgtgccagcgagtgccgtgaacaacctggcgtaaagcagaggagatattcaaagcgctccttaattgcagaaagtgaaaccacatttcaaataaactgggagaatcagcaaagctgcaaagattttcgccaacaaattgtctgcaaatgcaacaaactgtacttagaaacggcaaacagttggggaatttaaaaatcgggttactcaaaagatttttcgccgttaagatgtgcctcaacaacgattcctctgtagttcagtcggtagaacggcggactgttaatccgtatgtcactggttcgagtccagtcagaggagccaaattcctgaaaagcccgcttttatagcgggatttttgttatatctgataatcaatttcctcttcactgctttccatcacctgccgcttgatatcctcaacactcagtcctgcattacaaagttccagaaagcgccagacatagttacgctgaagttgtcctcgcttcagtcccaaccagacagtattagcatcaaaaagatgccgcgtatccaggcggattaaattctcttcctcttgttcgccactggattgctcggcaactaatccgatcccaagcccaagagcaacataggttttaatgacatcagaatcctgcgcacttaatacaatatctgccagcaaacctttgcgggcaaatgcgtcatcaatacgactgcgccccgtaatcccctgtcggtaagtgattaacggccacttcgctatactttccagcgtcaatggactaatttgcgtcaagggatgatcgtgtggaacaagcaaactatggtgccaacgaaaccacgggaaggcgacgagctgcgggtcattactcaaacgctcgctggcgataccaatatcagcttcgccattttgcaacaatgtcgcaatttcctgtggcgtcccctggattagctcgagccgaacctccgggaaaagttcgcgaaaagctttaatgacctctggcaagctataacgtgcctgagtatgcgtcgttgcaatagtgagaacgccagacgtatcgttggtaaacaggtctgcaagccgacgaacattactggcttcattcagaatacgttctgcaatgaccagtaatgctttgcccggttcagtcatgcccagcagtcgcttacctcgtcgaacaaatatttcgatgccaagttcatcctccagttcccgaatatgacggctgacgccactctgactggtaaaaagcatattcgcaacctctgtcaggttgtaatcctgacgtgcagcctcgcggattatctttagttgttggaaattcacggtaaactccgggcagttcagatttcccgttattgttaaagtctaatgcccggcataacaaataataaaaacccgcatcttattccatcccgatataacacttagctcaccaattgccactgccttttttccatcactggagaactaatcacactcattaacaactctttcactgcctgtgcctgtgggcttaagttcgctctggcgggtaaatttaaactcaaagagagactcatggaaggagtggtaatgcgactcatccacccatttactgcgccacataagctacgcgcggcgctttcgggtaatactgcaacgcccatgccgctggcaatcgctgcggtaagcgtggcaatagactcaatttcaccaataacttttgccgtgagtcgccgtagggaaaaagcctcatcaacacgaagtctaatagcactgtaatcactggggagaaagaggttcatttgcgcaatagcattcacatcaacgctttgccccgggcaatcttgagttcctaccagaaaaagatcttctttcagcaaagcctgactggatacaccagccacaggggaatgctcataaatcaccgccatatcgagttggtgatttatcaatttttcgttaagcactgcaccactattttcatgaagatagataacgatctccggaaattcagcgcgaaccgcctgtaataagggcatggtgatggaactcgcagcggttcctggtgcaaagccaatgctgacttgcccgcttaatgcctgaccaacgttatgcaccgccagttgggcctgttcacactgacgtaaaatggcccgcgcatgggtatagagaatttttccggcgtctgttggtgtaacgccccgctttgtacggatcaaaagttgttgatttaactcaccttccagtgtggcaacctgctggctgagcgctggttgtgcgatatgcaatacttcagcagcctgggtcaggctaccaatatctacaatttttacgaagtatttcaggcgtctgaagttcatgttgcctccggtttttaagaatcggcccaagtgccgccattacttacaaccagattgcaagatgcttgccagttttattttggtgttgatgtacaagctaaccaactgtcaaataagagattatgatagattcgtcatttgctcctttaatcagctgtcgcgttcccctgccctataaaaggagggtatgcaccacgatggttcattacccaataagattgaaagctcaccactttgttgaaattgacagcaaacaaacaaaaaaatgcatttcaccctttgacatcaccatgcactgccattaatatgcgccccgttcacacgattcctctgtagttcagtcggtagaacggcggactgttaatccgtatgtcactggttcgagtccagtcagaggagccaaattcaaaaaagcctgctttctagcaggctttttgctttctaattaccaacgctcttaaaacatctgtctactaccagaactaatttgcacaggcattccgcttcgacgttgcaacgcagcatttgcgcgatttacatcaacttcttgcccgttgataaacgcccgcaaagatggggttaccggcaatggcacttttcggtcagactcatattctgcacgattgcggctcaatggctcatgaacttccagccagttgctgccatctggttcagtggtgtattttactggctggtcgataatttgcacacgcgtcccaacaggaacattatcaaacagatatttgatatcgtcattgcgcagacgaatacagccctgacttacccggagcccaataccaaaattggcattggtaccatggatggcatacaacctgccaatataaatcgcgtacagccccatgggattatcggggcccgcaggaacaaatgcgggcaaactctcccctcgtttcgcatattcgcgccgagtgttcggcgttggcgtccaggttggagcttcttgtttacgttcaacggtagtcacccagttacgcggggtttctcgcccagcctggccgataccaataggaaagacttccacagtattactgtctggtgggtagtaataaagacgcatctcagcgacgttaacaacaatccctttacgaacagtgtcgggcaaaatcagttgctgcggaatggtgagttggctgccagacttcggcaaaaaaacatcagcgcccgggttcgcttccagcatgttacttaacccttgcccgtattgtgcggcaaaagtctccagcggctgggtattgtgatcaggaacagttacagtaaagctctgccccactaaacggctaccctctggaggtaatggataagttaccgccaggctagtatggctggcaaaaagcagagcaaaactgcaaagaatatttacacgacgcatcatgtccctttcctatgtcgcgaaagctatccgttaagtatagcttttatcagacttttcgtttttaactgttcaaatcagaagtcgtattccccggtagaacaatattactggcagcaagttcgcccatgttgttgtatatcgcacaggcagcttcgatgatgggcatcgccagagctgcgccactcccctcacctaaacgcatctccatattgagataaggctccagccccaaatggctgagcgctatacgcgcgcctttttctgcgctcaggtgagaaggaatgagatacggtttgatcgcaggagacatctggcaggctgcgagcgcagcagcataagaaagaaatccatccagcaacacgggtaaaccgcaggaagcagcacctaacatcactccagctattccgaccaaatcaaatccacccacttttgccaggacatcaacaccatcctgaggatttggttgattcaacgtaatcgcccgacgcacaacatcaattttattagccagtttatctgtcggcaggtttgcgccaatcccaaccacttcttcaggatcccggccagtgattgtgctgactattgctgctgccggtgtcgtgtttgccatccccagttcacctacaccaaacagcgtgacaccgttttttgccagctcctgcgtataacatatgacgtccaaaagcaacttttcagcctgacggcgactcattgccggagcactagcaatattgccgctacctcgtgcgacacgcatgttgataagcccggggataggctcagcagtatcaataccaacatcaattacgtggacgttagcgcccgcttgttctgccagcacacacacgccggttgttccacgggtcatattttcagcctgtatggctgtcacttcttttggagaaatagcgaccccttcctcccagacgccgtgatcggcacacataaccagtaccgcttttttgcccacatgcggtatgccattcaaccccggcattcctgccagttgtatggcaagcacctccagctttcccaggctaccaacaggtttgagtaacccgtcaatatgccgttgtgcacggctcatagcggtagaatcgatggctgggatcgtattcagtaaatcggcaagtatttgcatctcacgtctctttatagcagtgccagcaggaagaccagttcaccaagctctatggctgctcccagcgtatcgcccgtttgcccgcccagcgtacgtttgagaagctgaccgaggatgaaaatcgccaccatcgtcaccaccatagcagccacaccatgcatacccggcaataatacggcagcaaaaatagcggctaagccgagtgtgacgcaggtttgtcgcccatcaattttgccaatgaacacattgccaagcccttcttcccgcgcataacgatgacgatacatcaataatgcggcagtcccgcggctgaccgcacatgctgccgccaggcttgcaaggatgctttcgccacgcagagccaactcgcttaacaccagaatctttgccagtaccacaaaaatcaatgccagaccgccgtgggtgcctaaacggctatcacgcatgatttccaacatgcgatcgcggctacgtgcagaaaatacgccatcacaggtatcagcgaggccgtccagatggaatcccccggtcatcagcaccagcacaagtacgctaaacagtgccgccagtggtgcgccacaccatgcctgcagcaccatgaagaccagcccgctaatcgcgccaagcaataatccaatcaaaggaaaagtaataataccgcgagaataatgctcgaaatccagtccctgggaccagcgacgcggtacaggcagacgcgtaataaaactgagcatcgcccaaaataatttactcatttgatttttactccaataccgctaaccaccagccatacttcatttgccgcagcggccaactgctgatttacccgcccggcaatatcacgaaaatgtcgtgccagacgactctccggcacaatccccattcccacttcgttagtcactaatacaacctttgcggggcaacgttggcaggcagcaatcaagctctgaatctcagcattaatcgcctgttccatcgcctgataatcccattcatcagggtctttatcgccgccataatcaaacaacagattagtcaccattgtggtaacgcattcaagcaacacaacctcattcgggttaatgtctgcatgaattaattcatcaagatgttgccagcgctccactgtgcgccagtgctccgggcggccttgccgatgatgttctatccgtgcagccatctcatcatcaaggatttggctggtagcgatatacagaacctgactagagtccccaataagcgcctctgcgtggcgactcttcccgctccgtgcgccccccgtcaccaaaatcatcataccgactcctgattcaaatgtatgatggtattcattgaacagaacaatggatcccccaccgttgctgaccgcaaaacatttacgcgattaatactgcgcgtaatataattaaaaatccagcattctcaatccattacgaaataagatggcattacggaatagccagactttctcgtgttaacgtccgacaaaatgcgtcattgacagcggtttctgtggattgacacatttcattcagataatgaattaatgctactgccggaacaaccagcaaacgggcattgtgttctgaaatccaggctattgattcaacgtcagcgacagatctgcgctgtaaaagaacttgtaaaacaacgtaatagaattatccggaatggtggcgactatgcactagggaaggtgcgaataagtggggaaattcttctcggctgactcagtcatttcatttcttcatgtttgagccgattttttctcccgtaaatgccttgaatcagcctatttagaccgtttcttcgccatttaaggcgttatccccagtttgcagaaactccgtaatgagattaaaagcgctcataactcatctgtcggccagaaggcgcgcctctgaattatccgacggacaaaccgggaacagtgtaatttcccggcaggagcgaaaaaattgaaaggcgcatcttactcttttcgctttcaaaaaaaagagtggtcatcgcgttaacacaccgccctgagatgaattagtgatgttttggctgcaccgcaacatacatttcgatatcccagtacccatcttccgcgccattgttcaaataaacctcgaagcagggctttggtaacatttcataagcactgtcctgcaagagactattaaagaactgataccagggtttagcaaaatcatcaccgactacacgagctaccgccaccgcatactgaccacctgtaatttctgtcagaatgacgccctcactgttttcgggaagcgtaaagtaacccggcaccgtcacgacggtgtcgcagcgtaatttttcggcgggtgtttcatctggattgtcgtaatagacagcaacccactccttcggcacaatatttttgctatctacccacatcatcaactgctcaaagcctttctttaccgtctgttcccacgggccaacgagatggaaacctgcaacggtacgtttctcttcctgcttaatctcgtagttcatgacgcctccattgatactgtttttatatacagtatagttgcaaaattaaaaccacaaggaatgagtgttgattatgcgagcagactcgcactcctgccagtctgctgcaaaagaaaggtcaggccttatggtggaaataatcactcaggcgagaaaacatgctgccttccccgacagattccagggtaaccagcggccagtgcgccacctgtttatcacggtcgtaaagttcaatttcccctacccgctgatgggcgctaattggcgcggtgagttctttaccatcaagggtatatttggctttgatatgtggaatttcggctttcggtagcaccatccagaactcttgttccgttcccaggtcgatattttctttatcgccataccagatgcgttccgttccgacctttttcccacggtgcaaaatttgcaccgtagtaaagttttgttgcccccaacgcagtaattttcttgcctcttcctcacgaccttttgcactgtcagcccccattaccactgcaatgagacgacgctgcccatctacagcgctagcaatgagattaaacccggcaccagaagtatgacccgttttcaggccgtcaacattcatggttttatcccacaacaacccgttacggttttgctgggtgataccgttccaggtgagacttttctcactgtacatatgataaaactcgggctcgccgtggatgatagcacgagaaagcacagctaaatcataagcgctgctatgctggccaggtgcatccagaccatgcactgtttcaaaatgcgtatccttgagatgcagcttctcggcatagttgttcatcatttcaacaaactgccgttgcccaccggcaatatagtcagccagagcaacacaagcgtcatttccggaatccacaattaaaccacggcttaaatcacgtacgcttacgcgatcgccctctttcaaaaacatcagactagaaccgacaaacaccggattatctttcgcccacgcatcgcgccccacggtgacaatatcgtctggcgtaatgcgatgactatcgatagcgcgatccacgacataacccgtcatcagctttgtcaggctggcgggattgcgctgttgatgctcattacccgcggtgaggatctgaccggtggtgtaatccatcaatacccaggacccggcatgaatctctggaggctgaggactaaaaggaatgttttccgccgcaaaaccagagcttaagttaaaaacgaacaaagaagcagcaataataagacggcgtttcaacagcaaaccctcaggagtttcaaatagctgttctttttacggaaatacttatgaactggctggaataaagtgcaagaaaatgtgactaccctctcatttttatctgacatgatctgttgccactcgctgccaaattgtggcgctaaagctgattagcacggtgatatttgatactctggcagacagcagaaataacggatttaacctaatgatgaatgacggtaagcaacaatctacctttttgtttcacgattacgaaacctttggcacgcaccccgcgttagatcgccctgcacagttcgcagccattcgcaccgatagcgaattcaatgtcatcggcgaacccgaagtcttttactgcaagcccgctgatgactatttaccccagccaggagccgtattaattaccggtattaccccgcaggaagcacgggcgaaaggagaaaacgaagccgcgtttgccgcccgtattcacagcctttttaccgtaccgaagacctgtattctgggctacaacaatgtgcgtttcgacgacgaagtcacacgcaacattttttatcgtaatttctacgatccttacgcctggagctggcagcatgataacagccgctgggatttactggatgttatgcgtgcctgttatgccctgcgcccggaaggaataaactggcctgaaaatgatgacggtctaccgagctttcgccttgagcatttaaccaaagcgaatggtattgaacatagcaacgcccacgatgcgatggctgatgtgtacgccactattgcgatggcaaagctggtaaaaacgcgtcagccacgcctgtttgattatctctttacccatcgtaataaacacaaactgatggcgttgattgatgttccgcagatgaaacccctggtgcacgtttccggaatgtttggagcatggcgcggcaataccagctgggtggcaccgctggcgtggcatcctgaaaatcgcaatgccgtaattatggtggatttggcaggagacattagcccattactggaactggatagcgacacattgcgcgagcgtttatataccgcaaaaaccgatcttggcgataacgccgccgttccggttaagctggtgcatatcaataaatgtccggtgctggcccaggcgaatacgctacgcccggaagatgccgaccgactgggaattaatcgtcagcattgcctcgataacctgaaaattctgcgtgaaaatccgcaagtgcgcgaaaaagtggtggcgatattcgcggaagccgaaccgtttacgcctagtgataacgtggatgcacagctttataacggctttttcagtgacgcagatcgtgcagcaatgaaaattgtgctggaaaccgagccgcgtaatttaccggcactggatatcacttttgttgataaacggattgaaaagctgttgttcaattatcgggcacgcaacttcccggggacgctggattatgccgagcagcaacgctggctggagcaccgtcgccaggtcttcacgccagagtttttgcagggttatgctgatgaattgcagatgctggtacaacaatatgccgatgacaaagagaaagtggcgctgttaaaagcactttggcagtacgcggaagagattgtctaatttgaagcctccgccgctggtacggcggaggacaatgttgagtcaggctttttgaacggtgatgctccacgctgcatcgccaatctgctgataatcggtgatggcatgtccttcttctgccgcccactgtgggattgcttcagttgcctgggtgcaatcaaactcaatcactaactcatcgccgctgaccatttctgccagagctgcttttgcttctatgagtggaaacggacagacctgcgtcaccacatccagctttttaatcaccatctttacaccttacttaatttgccgcagcagttgccagtcgcgccttacgctgcggtcgaacatacacaagccaggacgcagtccagactccgagaatcataaatacaaggccaatccagccctgccaggtcatcattgcagtcataaccagtccattaccgatagagcaaccacctgcaatactggcaccgaagcccatcagtacaccacctaacccgctacgtaatgttgtttgtgcatcagctgcgcgaacgcggaactcacggctcgctttggctgcaataaaactccccacgaagatccctaacaccaggaaaacgccccagttaatgtatttcatgtcacccgcgaccagaaattgcagaatattggccgttggggaagtgattcctaacccaaacatgcgtccggttgcttcactcaggggccaggctaaaagcgcaatcaaaccgatgagtacagctgtgacaaagggatgccagcgtttttcaaacagaatatgagcgatcccggttcggcgcggcggtaaggtcgcgactttgagttttggcttcttcaactctttcatcaccacccagagcgttatcaccagcaaaacggcaaccaacggccacacagacaaattaaaagtctcagcaatagagttatgttcagtactgtagtgctgcaaggtttgatttaaaccactggcatgtggagaacgcatcaccgcactcatcaccatataagtgaaaagcgcgatccaactgccgatcaatccctcacccgcgcgataccaggtcccggtggcacatccacccgccagaacaattcccagcccgaagatatacccacctataacagtaccaagccacgggaacgccccggcttcgtaagtcagtaggcccgcctgaattaacgcaaaaacccccacgctttgtacgctaattgcaatcagcaaggcgtaaaacatgcgattatttttcacgatatacatatcgcgaaaaccacctgtcaggcaaaaacgcccacgctgcatgacaaatcccagcagagcaccacaaattagcccgcttaatatcatactaaacataaattaattaaccagatgaatgttaatgaggaaattattcatgactggtggaatgcagaccaataaccaaattctctaaattagaacaaatggttattaatgaggagttcgatacaaaagaataaaaaaaccggagccaaatgttcattcgactccggtttattattagaaaagatgattatgctacgtcttcgtactgcggaaccggattacggaagctcttggtgacgcaagccaggtaaatcagaccgatagcagcccagatcagacccagaaccatactgctttcttccaggttaacccacagcgcaccaacggtcagcgcaccacacatcggcaggaacagatactggaagtgatctttcagcgtcttgttacgcttctcacggatccagaactggctgatgacgctcaggttaacgaaagtgaacgccaccagcgcaccaaagttaatcagcgccgttgccattaccaggtcgaagttgattgccagcagggcaatcgcgccaaccaggatgatgttcatcgccggagtacgccatttcgggtgtacataaccgaagaagcttttcgggaatacgccgtcacgacccattacgtacatcagacgcgctacgcctgcatgcgccgccataccggacgccagtacggtaatggtggagaagatcagcgcgccaacctggaacgctttacccgcaacgtacagcatgatttcaggctgactcgcatccggatctttaaagcgagagatatccgggaagtacagctgcaggaagtaagttgcaaagatgaagatcatgccgccgatcagcgcggtcaggaaaatcgcacgcgggatcacgcgctctgcatctttggtttcttcgctcaggttgctgatgccgtcaaagccggtaaaggagaagcacaggattgtcgccccggtaatcatcgggataacatgcgcatcgccagaccagaatggacgagtgctcgccagcgtaccagcgccttcaccttcaaatacgccataaacaaccatgcccagaatcaccgcgatcagcactacctgcaacacgacgattacagtgttgaagttcgctacggatttcagactacgcaggttaaaggcggtcataaaggccaccagcgccaccacaaacatccagcttgggatggaaggcaccagagcttcaaaatagattttcgccagtagaatgttgatcatcggcgcgaacagatagtcgagcagagaagaccaacccaccataaagccgacagtcgggctaatggatttctgggcgtaagtgtatgcagagccagcagaaggatagcggcgaaccagcttcccgtagctcagagccgtaaacaggatcgcaatcaatgcgaacgcataggctgtcggcacatgaccatccgtgaggccactaacgataccaaaagtatcaaacagcgtcatcggctgcatataggcaagacccatcattacaaccggaactaacgtaagcgttttacgcaattccacgcgagaggtgtttggagtaacgttatggctcatggtcattctcctttacggtgataaccgtcgcgtaagcaaaaaattgccccatttttttggattcctcagcgacaacaactgtcgatttttagtaaatatctatccggtacgaagcccggcctcttggtatgaatgattggtttgaagcaaaaaataaccgacgctgatgaaacgtcggtttttagtcattttttgacagcggcgcattgtgcctaaatgggggggaaatgacaagagaatgagaggcttgtcagaataatttttctttaaatggcactttttccgtcatcagattttgcataaacaccggcgatcgcactatttgctaaaatttcatcccgccaccagccactggcaagtcctgcggtctgttcgttccagccaatccagacgggttcaaagagagtttgggcgaccactttcttctcgattaacgcgccactatcgagaaaacgttgcgccagataacggggtaaatagccgcagccgaggccgctaatttgcagctccagtttggttttaaaatcgaaaacggtaatggcttcttgttcgtcgagaagttgacttgccgtagaagcgcctgcctgcgcagtatcccccaccacaatcgcccgatatcgcttaataatacgacgatttaacggctcttcttccagggctaacggatgatgaggcgcgaccgcaaagacttgttccagatcgcccaaccgactaaaaccaaactcactggaagatggtggctcatgcatcgcgccaacaataatatccgctcgcccctgagtcagggcatcccaactaccaccgagtacgccattgataaacttcaggcgcgtcacgctatgatgttgataaaaagcttcaatgagtggcgcaagcagagaaaaaggaaacgtgtcgtccacgccaatcaccagctcgttttcccagccttcatgcagtttgatcgcctgcttttccagttcccgcacggtatgcagaacttcccgccctttctctaataacatttttccggtgcgggtgaatttagcgcggtgtccgctacgatcaagcaattgaatattaaggtcgctttccagcttgtgaacggtgtaactcagagcggacggcgtcttgtagagtttggcgctcgccgccgcaaaactgccttctttttctaaggcatcgaggatcatcaacacatccagcagtggtttcatacacgcccccttgcagtgcatgcggcgtcctgctggcgtgatcgtttactccagcggcattaccagcggatcgggatactggtattcaaatcccagttcattacaaatccgactgccatcaataatcttacctttgccgctgtccagactatttctgaactgcggaggttccagccccagtaaacgggccatctgcggatagaaaacattacgcgcagggtgagctggcgcacatatattatagatgtgtccgcctttaggtgcctgtaacaacagagtgatagcgccaataacatcttctaaatggactaaattaacaccatgttcaccatcaggcgcggtttttccggcaaagaagcgtccgggatgacgtcccggtccgaccaggcccgcaagacgcagaatatcgacgctagtaccgggtaaattgtgcagccagtcttcgagttcttctaatactcgtccactgttggttactggattacgcggggtggtttctttcaccgtgccttgcgcgtcgccatagacagatgtactgctggtaaaaataatgcggggaatacgatgggccagcgcgctatccactaactcttgtaccgcttgtaaatagaactcatcgccggggccgctacgacgtgccggaagcgtaatgaccagcgcatcggcatccatcagggcatccagatcgtcagaatcgcaaactagctcaggctccatgcgaagcagatagctatcaatgccactcattcgggccgcttcgacaccatcttgtgtggttttactcccggtgacttgccagcctcgcgcactaagactcatcgccagcggcatgcctaaccaccctaacccgacaattgcgacctttttcatccgttatctcctgatacaccttagatctataaggctacgctagcgtatcaaaactgacaattcattctatgaatgaatctgttcaataatgataacgacatgctgcaatgagcagactatcgtcggtaaccgcgtataccagacggtgctcctctgtaatgcgtcgggaccagaaaccactcaaattatgtttcaggggttctggcttccccttaccttcaaatggcgttctgcgggtatctttgataagttcattgatctttttaacaattcgcttatctgtttcctgccagtacagataatcgtcccaactttcctcagaccagattagtttcactcaatgatgtccttttccgttcctttgccacttttcaggctatcgatactgtccatcaatctccgggcgttagcgggggagcgcagtagataagccgtctcttccaggctgttgtattcttcgagactcatcagaacacaagcctctccattctgacgagtaataaggatcggggcatgatcttcaacggctttcatcattgttgcgctcaaattctgacgcgcttcgctgtagctaattgtacgcatgtcaatctcctcttttgtacagttcattgtacaatgatgagcgttaattaactatttattaattagtttgtagatcaaggtattgtcagtgagacgaaaatccaggcttcgctatttttggtgccatcagctaagaggacagtcctcttagccccctcctttccccgctcattcattaaacaaatccattgccataaaatatataaaaaagcccttgctttctaacgtgaaagtggtttaggttaaaagacatcagttgaataaacattcacagagacttttatgacacgcgttcaatttaaacaccaccatcatcaccatcatcctgactaatctttcaggcgatgtgtgctggaagacattcagatcttccagtggtgcatgaacgcatgagaaagcccccggaagatcaccttccgggggcttttttattgcgcggttgataacggttcagacaggtttaaagaggaataacaaaatgacagacaacactcgtttacgcatagctatgcagaaatccggccgtttaagtgatgacagtcgcgaattgctggcgcgctgtggcattaaaattaatcttcacacccagcgcctgatcgcgatggcagaaaacatgccgattgatattctgcgcgtgcgtgacgacgacattcccggtctggtaatggatggcgtggtagaccttgggattatcggcgaaaacgtgctggaagaagagctgcttaaccgccgcgcccagggtgaagatccacgctactttaccctgcgtcgtctggatttcggcggctgtcgtcttagcctggcaacgccggttgatgaagcctgggacggtccgctctccttaaacggtaaacgtatcgccacctcttatcctcacctgctcaagcgttatctcgaccagaaaggcatctcttttaaatcctgcttactgaacggttctgttgaagtcgccccgcgtgccggactggcggatgcgatttgcgatctggtttccaccggtgccacgctggaagctaacggcctgcgcgaagtcgaagttatctatcgcagcaaagcctgcctgattcaacgcgatggcgaaatggaagaatccaaacagcaactgatcgacaaactgctgacccgtattcagggtgtgatccaggcgcgcgaaagtaaatacatcatgatgcacgcaccgaccgaacgtctggatgaagtcatcgccctgctgccaggtgccgaacgcccaactattctgccgctggcgggtgaccaacagcgcgtagcgatgcacatggtcagcagcgaaaccctgttctgggaaaccatggaaaaactgaaagcgctgggtgccagtagtattctggtcctgccgattgagaagatgatggagtgatcgccatgagctttaacacaatcattgactggaatagctgtactgcggagcaacaacgccagctgttaatgcgcccggcgatttccgcctctgaaagcattacccgcactgttaacgatattctcgataacgtgaaagcacgcggcgatgaggccctgcgggaatacagcgcgaagtttgataaaaccacggttaccgcgctgaaggtgtctgcagaggagatcgccgccgccagcgaacgcctgagcgacgagctaaaacaggcgatggcggtggcagtaaagaatattgaaaccttccacactgcgcaaaaactgccgccggtagatgtagaaacgcagccaggcgtgcgttgccagcaggtcacgcgtccggtagctagtgttgggttgtatattcctggcggctccgccccgctcttcagtacggtattaatgctggcgactccggcgagtattgcgggctgtaaaaaagtggtgctgtgcagtccgccgccgattgccgatgagatcctttatgcggcgcagctgtgcggtgtgcaggacgtgtttaacgtcggcggcgcacaggccattgccgcactggcgtttggtacggaatctgtgccaaaagtggacaaaatcttcgggccgggtaacgcctttgtcaccgaagcgaaacgtcaggtgagccagcgtctggacggtgcggcgatcgatatgcccgcaggcccgagcgaagtgctggtgattgctgacagcggcgctacgccggatttcgtggcttctgatttgctctctcaggctgaacacggcccggacagtcaggtgattttactgacgcccgctgctgatatggcgcgtcgcgttgccgaggccgtcgaacgccaactggcagaactgccgcgtgccgaaaccgcccgccaggcactgaacgccagccgcctgatcgtgactaaagatttagcgcagtgcgtggagatctccaaccagtacggcccggagcacctgatcattcagacccgcaacgcccgtgaactggtcgatagcatcaccagcgccggtagcgtatttcttggtgactggagtccggaaagcgcaggtgattacgcctccggcaccaaccacgttctaccgacttacggttacaccgccacctgttccagcctcgggctggcagatttccagaagcgcatgaccgtacaggaactgagcaaagaggggttctccgcgctggctagtaccatagaaacactggccgccgccgagcgcctgaccgcccacaaaaatgccgttactttgcgtgttaacgcccttaaggagcaagcatgagcaccgtgactattaccgatttagcgcgtgaaaacgtccgcaacctgacgccgtatcagagcgcgcgtcgtctgggcggtaacggcgatgtctggctgaacgccaacgaataccccactgccgtggagtttcagcttactcagcaaacgctcaaccgctacccggaatgccagccgaaagcggtgattgaaaattacgcgcaatatgcaggcgtaaaaccggagcaggtgctggtcagccgtggcgcggacgaaggtattgaactgctgattcgcgctttttgcgaaccgggtaaagacgccatcctctactgcccgccaacgtacggcatgtacagcgtcagcgccgaaacgattggcgtcgagtgccgcacagtgccgacgctggacaactggcaactggacttacagggcatttccgacaagctggacggcgtaaaagtggtttatgtttgcagccccaataacccgaccgggcaactgatcaatccgcaggattttcgcaccctgctggagttaacccgcggtaaggcgattgtggttgccgatgaagcctatatcgagttttgcccgcaggcaagcctggctggctggctggcggaatatccgcacctggctattttacgcacactgagcaaagcttttgctctggcggggcttcgttgcggatttacgctggcaaacgaagaagtcatcaacctgctgatgaaagtgatcgccccctacccgctcagcacgccggttgccgacattgcggcccaggcgttaagcccacagggaatcgtcgccatgcgcgaacgggtagcgcaaattattgcagaacgcgaatacctgattgccgcactgaaagagatcccctgcgtagagcaggttttcgactctgaaaccaactacattctggcgcgctttaaagcctccagtgcggtgtttaaatctttgtgggatcagggcattatcttacgtgatcagaataaacaaccctctttaagcggctgcctgcgaattaccgtcggaacccgtgaagaaagccagcgcgtcattgacgccttacgtgcggagcaagtttgatgagtcagaagtatctttttatcgatcgcgatggaaccctgattagcgaaccgccgagtgattttcaggtggaccgttttgataaactcgcctttgaaccgggcgtgatcccggaactgctgaagctgcaaaaagcgggctacaagctggtgatgatcactaatcaggatggtcttggaacacaaagtttcccacaggcggatttcgatggcccgcacaacctgatgatgcagatcttcaccagccaaggcgtacagtttgatgaagtgctgatttgtccgcacctgcccgccgatgagtgcgactgccgtaagccgaaagtaaaactggtggaacgttatctggctgagcaagcgatggatcgcgctaacagttatgtgattggcgatcgcgcgaccgacattcaactggcggaaaacatgggcattactggtttacgctacgaccgcgaaaccctgaactggccaatgattggcgagcaactcaccagacgtgaccgttacgctcacgtagtgcgtaataccaaagagacgcagattgacgttcaggtgtggctggatcgtgaaggtggcagcaagattaacaccggcgttggcttctttgatcatatgctggatcagatcgctacccacggcggtttccgcatggaaatcaacgtcaaaggcgacctctatatcgacgatcaccacaccgtcgaagataccggcctggcgctgggcgaagcgctaaaaatcgccctcggagacaaacgcggtatttgccgctttggttttgtgctaccgatggacgaatgccttgcccgctgcgcgctggatatctctggtcgcccgcacctggaatataaagccgagtttacctaccagcgcgtgggcgatctcagcaccgaaatgatcgagcacttcttccgtagcctcagttacaccatgggcgtgacgctacacctgaaaaccaaaggtaaaaacgatcatcaccgtgtagagagtctgttcaaagcctttggtcgcaccctgcgccaggccatccgcgtggaaggcgataccctgcccagcagcaaaggagtgctgtaatgaacgtggtgatccttgataccggctgcgccaacctgaacagcgtgaagtctgccattgcgcgtcacggttatgaacccaaagtcagccgtgacccggacgtcgtgttgctggccgataaactgtttttacccggcgttggcactgcgcaagcggcgatggatcaggtacgtgagcgcgagctgtttgatctcatcaaagcctgtacccaaccggtgctgggcatctgcttagggatgcaactgctggggcggcgcagcgaagagagcaacggcgtcgacttgctgggcatcatcgacgaagacgtgccgaaaatgaccgactttggtctgccactgccacatatgggctggaaccgcgtttacccgcaggcaggcaaccgcctgtttcaggggattgaagacggcgcgtacttttactttgttcacagctacgcaatgccggtcaatccgtggaccatcgcccagtgtaattacggcgaaccgttcaccgcggcggtacaaaaagataacttctacggcgtgcagttccacccggagcgttctggtgccgctggtgctaagttgctgaaaaacttcctggagatgtgatgattattccggcattagatttaatcgacggcactgtggtgcgtctccatcagggcgattacggcaaacagcgcgattacggtaacgacccgctgccgcgattgcaggattacgccgcgcagggtgccgaagtgctgcacctggtggatctgaccggggcaaaagatccggctaaacgtcaaatcccgctgattaaaaccctggtcgcgggcgttaacgttccggtgcaggttggcggcggcgtgcgtagcgaagaagatgtggcggcgttactggaagcgggcgttgcgcgcgtagtggtcggctccaccgcggtgaaaagtcaagatatggtgaaaggctggtttgaacgcttcggtgccgatgccttagtgctggcgctggatgtccgtattgacgagcaaggcaacaagcaggtggcagtcagcggctggcaagagaacagcggcgttagtctggaacaactggtggaaacctatctgcccgtcggcctgaaacatgtgctgtgtaccgatatcagccgcgacggcacgctggcaggctctaacgtctctttatatgaagaagtgtgcgccagatatccgcaggtggcatttcagtcctccggcggtattggcgacattgatgatgtggcggccctgcgtggcactggtgtgcgcggcgtaatagttggtcgggcattactggaaggtaaattcaccgtgaaggaggccatcgcatgctggcaaaacgcataatcccatgtctcgacgttcgtgatggtcaggtggtgaaaggcgtacagtttcgcaaccatgaaatcattggcgatatcgtgccgctggcaaaacgctacgctgaagaaggcgctgacgaactggtgttctacgatatcaccgcttccagcgatggccgtgtggtagataaaagctgggtatctcgcgtggcggaagtgatcgacattccgttttgtgtggcgggtgggattaagtctctggaagatgccgcgaaaattctttcctttggcgcggataaaatttccatcaactctcctgcgctggcagacccaacattaattactcgcctggccgatcgctttggcgtgcagtgtattgtggtcggtattgatacctggtacgacgccgaaaccggtaaatatcatgtgaatcaatataccggcgatgaaagccgcacccgcgtcactcaatgggaaacgctcgactgggtacaggaagtgcaaaaacgcggtgccggagaaatcgtcctcaatatgatgaatcaggacggcgtgcgtaacggttacgacctcgaacaactgaaaaaagtgcgtgaagtttgccacgtcccgctgattgcctccggtggcgcgggcaccatggaacacttcctcgaagccttccgcgatgccgacgttgacggcgcgctggcagcttccgtattccacaaacaaataatcaatattggtgaattaaaagcgtacctggcaacacagggcgtggagatcaggatatgttaacagaacaacaacgtcgcgaactggactgggaaaaaaccgacggacttatgccggtgattgtgcaacacgcggtatccggcgaagtgctaatgctgggctatatgaacccggaagccttagacaaaaccctcgaaagcggcaaagtcaccttcttcagccgcactaaacagcgactgtggaccaaaggcgaaacgagcggcaatttcctcaacgtagtgagtattgccccggactgcgacaacgacacgttactggtgctggcgaatcccatcggcccgacctgccacaaaggcaccagcagttgcttcggcgacaccgctcaccagtggctgttcctgtatcaactggaacaactgctcgccgagcgcaaatctgccgatccggaaacctcctacaccgccaaactgtatgccagcggcaccaaacgcattgcgcagaaagtgggtgaagaaggcgtggaaaccgcgctggcagcaacggtacatgaccgctttgagctgaccaacgaggcgtctgatttgatgtatcacctgctggtgttgttgcaggatcaggggctggatttaacgacggtaattgagaacctgcgtaaacggcatcagtgagttgcggggtaagcggatgcgatattgttgccgcatccggcaaaaaaacgggcaaggtgtcaccaccctgccctttttctttaaaaccgaaaagattacttcgcgttgtaattgcgtagagcattacgccccagcacaatccccgcgccaaccatgccacccagcagcaccgccagaatcaaggtaattgcctttttcgggctatcacgacgaataggtaacatcggtttcatcacataacggtaagcatgaatatcaagatcatcaacttttaagctttcgatatccagcaggttttgacgagtctgatagtagtttgggctgaacaccaacggacgggtcgcctcatgcttaatcatgctctccagcgcttcgctccccaaaaggaacaacgtatcttgtgtgatatcttcgccagtctgttgaatctgcggttttgtcacctgcgcctgattcgcatactgcaacgcttcctgaatctgacggatacgcagatctttctgctcctgcgcgactacttcctgcgttcttaaagagtcctgcaagtttttccgtcccagagcaatgttgtctttgagatccttttctagctcttgattcactttatcgtcaacttgctgaatgtattgggccaacttcatttgtgcgccctctgcagtttgcccaacataagaaacagtcaatggtaattgctggttcttaacagaaggttcgatggtaagtttttctcgttcttcctgattatccagcgtttctgctaatgcagagaaggcagaactgaagcgaccaattaacgtctcctgcaaatcgcttactttcggtgcagcctgaccatagataacattcatggcattgttatagccagcaatttgccccacgtcgggctgagtgataattgctgtactcgtccatttctccttcgctactgccaaatatccaatagccagggcaatagccacaatgacggaaatgatgattgtcatcttgccacgccacaactgcactagtaaatcaatcaaatcaatctgttccgggtcatggttttgcccagaaacattattattttctactctcatcattaccctaactgacggaaatttccaagtccgcatagtttagcgataatcctcgtgaatgctataggataagtgataaaaataatgaattgttgtgtaagtaacaaaagacaatcagggcgtaaatagccctgataacaagatgttagtcgctgccaaagagatcgcgggtgtataccttatctgccacatccttaagctcttctgccattcggttagagataatgacgtcggcttgttgtttgaaggtggcgagatcacgttccaggcgagagttgaagaaactgtcttctttcatcactggctcgtagatgatcacttcaacacctttcgccttgatacgtttcataatcccctgaatagaagacgcacggaagttatcactaccgctcttcataatcagacgataaatacccaccacttgcggcttgcgactcaaaatggcatcggcaataaaatctttacgcgtgcggttagcatcgacaattgcgctgatcaggttattcggcacagactggtagttcgccagtaactgcttggtatctttcggcagacaataaccaccataaccaaagctcggattgttgtaatggttgccaatacgtgggtcgagacaaacgccttcgattatttgacgggaattcagacctaaactttctgcatagctatccagttcgttaaagtacgccacgcgcatcgccaggtaggtgtttgcaaaaagtttaatcgcttctgcttcagtggagtcggtaaacagcatcgggatattttgcttaatcgcgccttcctgtaacagagcagcgaaacgttctgcgcgttcactacgctcaccgatgacaatacgactaggatggagattatcgtaaagggctttaccctcacggagaaattccggggagaatataatattttcagtgcgatatttcttatgcatcgctgcggtaaaaccaacgggaaccgtacttttgatgaccataaccgcataaggatttatctcaactacgtctttaattacactttctacactggatgtattgaaataattagttttaggatcatagtcggttggagtggcgatgatgacataatcagcatcccggtaggcttcatttttatctaatgtggcattaaagtgtattttatcactttgcaaaaactgctgaatttccttatcaacaataggagatatccgatcattcagcatagcaacgcgactcggtaaaatatctaatgccacaacctcatgattttgtgcgattagaagcccgttactcaagcctacatagccagtaccggaaatggtgattttcatttcatgctctcagaattaacttaactgtgaatcatgatgtttttagcatcctgataagagctaaaagttttaacgctacgttgttcgatggtcaacgcaacgaaaaacaattcagattttctttataagaatagctgatatttattaagttaatattaagcagtgaaatttagtctataagatatttggcaaaaaaaagcccggtgcaatatacgccgggcctcaattttattgttggttaaatcagattaatccagccattcggtatggaacacaccttctttatcaatacgcttataagtatgcgcaccaaaatagtcacgctgtgcctggatcaggttcgcaggcagaacagcagcacggtagctgtcgtaataggcaaccgctgcggagaaggtcggaaccggaataccgttctgtactgcataagcaacgacatcacgcagcgcctgctggtagtcatcggcaatttgcttgaagtacggagccagcaacaggttagcgatctgtggattttcggcataagcatcggtgattttctgcaggaactgcgcacggatgatgcagccagcacggaaaatcttcgcgatttcgccgtagttcagatcccagttgtactcttcagacgcagcacgcagctgagagaagccctgggcgtaagaaacgattttgcccagatacagcgcacgacgaactttttcgatgaactcagccttgtcgcctgctggctgtgcttgcggaccagagagaactttagatgcggcaacacgctgatctttcagagaagagatataacgtgcaaacacagactcggtaatcaggctcagcggttcgccgagatccagcgcgctctggctggtccatttaccggtacctttgttagccgcttcatccaggatcacatcaaccaggtagttaccgtcttcatcttttttggtgaagatatctttggtgatgtcgatcaggtaactgctcagttcaccgttattccactcggtaaaggtctgcgccagttcttcgttggtgaggttcaggccacctttaagcagagaataggcttcagcaatcagctgcatatcgccgtattcaataccgttgtgaaccatcttcacatagtgacctgcgccatcggcaccaatataggtaacgcatggttcaccgtcttcagctacggcggcgattttggtcaggatcggtgctaccaattcataggcttctttctggccaccaggcataatagaaggacctttcagcgccccctcttcaccgccagaaacaccggtaccgatgaagttaaagccctctgcactaagctcacgattacgacgaatagtgtcctggaagaaggtgttaccaccatcaatgatgatgtctcctttatcgagatatggtttgagggaatcaatagcagcatccgtgcctgcacctgctttcaccattaacaggatgcgacgaggcgtttccagagattcgacaaactctttcaccgtatagtaaggaaccagtttcttgcctggattttcggcaatcacttcttccgtcttctcacgggaacggttgaaaatagagacggtataaccacggctttcgatgttgagcgcaaggttgcgtcccatcactgccataccgactacgccgatctgttgcttggacattacatactcctgtcaggtgtgatcaccgcgctgaatgctcgcggcctggaatgttcgcaaataagtatacaaagtacttattaaagtataaatagcttatccatgcttatatgcttacggctttatatgtctccacatgcgatatttcttaaataatgttttattattaccacttttaattcagggataatgtgaggttattaccctcaaataatatgagataaatagtgctgcaacattgcatttttgccccgatttatccatgatcgaattgtgacatttgtcatacaacgaataggttttgtacttactatggaatggattgccgatccgtctatctgggccgggttaatcacgctgattgtgatcgaactggtcctcggcattgataacctggtctttattgccatcctcgccgaaaaactaccgccgaagcagcgtgaccgcgcacgggttaccgggctgctgctggcaatgttaatgcgcctgttactgctggcgagtatctcctggctggtcaccctgactcaaccgctgttcagcttccgcagctttacctttagcgcccgcgacttaatcatgctgtttggtggtttcttcctgttgttcaaagccacgatggagctgaacgaacggctggaagggaaagacagcaataatcccacacaacgcaaaggtgcgaagttctggggcgtggtgacgcaaattgtggtactggacgccattttcagtctcgacagtgtgattaccgccgtcgggatggtcgaccatttactggtcatgatggccgccgtggttatcgctatcagcctgatgttgatggccagcaagccgttaacgcaatttgttaacagtcacccgacgatcgttattctctgcttaagcttcctgttgatgattggctttagcctggtggcagaaggtttcggcttcgtcattccgaaaggctacctgtacgctgccattggtttcagcgtgatgatcgaggcgctcaatcagttggctatctttaaccggcgacgttttctttccgctaaccagacgctgcgccagcggactaccgaagcggtaatgcgcctgcttagcgggcaaaaagaagatgcggaactggacgccgaaaccgcgtccatgctggtggatcatggtaaccagcagatctttaatccgcaggaacggcggatgattgagcgggtacttaatcttaaccagcgtaccgtcagcagcattatgacgagccgccacgatattgagcatatcgatctcaacgcgccggaagaagaaatccgccagttgctggagcgaaatcagcatacgcggctggtggttaccgacggtgatgacgcagaagatttgctcggtgttgttcacgttatcgacctgctacaacagtctctgcgcggcgaaccgctcaacctgcgggtgttgattcgccagccgctggtgttcccggaaaccttgccgttgttacctgccctggagcagttccgtaatgcccgcacgcactttgcttttgtggtggatgagtttggcagcgtggaagggattgtgacattaagtgacgtcactgaaaccattgccggtaacttaccgaacgaagtggaagagatcgacgcccgccatgatattcagaagaatgcggacggttcctggacggcgaatggtcatatgccgctggaggatctggtgcaatatgtgccgctgccgctggatgaaaaacgtgaatatcacaccattgccgggctgttgatggagtatttgcagcgtattccaaaacctggcgaagaagttcaggtgggggattatttgcttaaaacgttgcaggtagaaagccatcgcgtgcagaaggtgcagattataccgctgcgtaaggatggcgagatggagtacgaggtgtgatggtatcggtcattttacccaatagccgaaaggaataagatgagggaaccgcgccatcggcgatttaccgccgggagcccgggttgccagggtggtggagattgagccaccctggcacgttcaccggcttgagcgttccatagtagcgaggaacatcaagtgaacggaacagccttcgatcttacatattcagaatataatgatgccgccacgaacgcctgatgcgacgctttacgcgtcttatcaggcctacaggactggtcacctggtaacttacatcttctccagcaacttcttcacatctttgccattacgggaatctttattccgctcggcccagtcattcaggcgacgtttcgcttcgtcctgtagatgtttgcgcagtaactgatccacttgcaggctgtaattgagttgctgccagttgccataaacccgcagcggtactggcgtttctttcaggaaatcaatcagtttgctttccccgttccagccacccacgacccgaatatcaaactgggtgtcgcaggtttgatctgccagattcaacatgccttcccctgtcagcgccagcacagggctttgaccttgcatgtcgtttaacgtcacgacgccatccttcaacgtcaaatcggtggtaaagcggtcaagccgcgtcacgttatcaaagttttcagcggccttcacatcaccgccattacgctctaccgcttgctgaatcatctgctggaagttcatcccttccatgcgcgtgtcggtcatttcgacatgtgcctgtccttgccagttgtggcggaatgcgtcggcatctatgtcagcaccggagaaatcaccagccagactcatttttccggtcaagctaatcggatagttaaacgccttcagaatggtaccaatctcaacgttttccagccgtggctggaagtttatccgcggatttatacttgtcgcgtccagcgtgcccggcagactaacctgtccaccgttaagtttgccctgcagttgagtaatttccagcaaaccgctcttgttggtcatttgcgtggcaacatctgtaaaattcattccgcgccagcgcacgttactggcctgcaacaaaatatcagccgtaaagccttgcagtccctgataggccggttcatcaatacggctagaaatgaccgggcgcggcaacgtactttggctctgcccctgctgcgcggcaccgttttcaccattcgcggtttcattaagcgggatgaggttgtcaagattcagttgcgggaattgcagcctcagctgccattccggtttctctgtcagcgtaacctgtgcttgcccgcttagcgtactatcattggcggtcaaactaatttggttaaaactaaggcgtttatgactctcctgccactgggcctggaaactcccctgcccctgaataccttgttttggtaaatcggcaccctgcaactgccagttaatttgttcaatagccgccgttaaatcatgcggataatcagaagcatctaccgtaccgttaagggatatcgtgagatcgcgctgatcgcgattaacccgcccggagaactcaaaactaccacgatgttggggatcttgttccatttgcaggcgaatattgcggattgtcacctgctcgtcatcttcatgctggaacaccagcacgctgtccgccaccttaagactggatatatcaaagctccatccgcgatcgtcactcagatccggcaaggtattgtcgcgcggtgcaaccggagcgtcttcactgcgcaccgcttccgtctgcggcgtcagttggatcactgccccttttagcatcacctgcttaacgctcagttgatgactcagtagtggtaaaagcgccacgtccagacgcatgttgtcggcgcgaaccagtggctggcttgcgccctgggcggtgagagacattcgcccggagaggatactaagctgcggccagacgtgccaacgcagtggcccgtcgagctgcaattgataaccgctacgtgcagcaacttgcttgaccatatagtcgcggaaatcattcggattcaccagcaacactaacgcagataacccggccaccagcacgaccaggagtatcatcagcgtcgtcagaaatcgtctcatggtatcctcaatgggcctgaattagtctttatcgattcggctggctaccgcgccctgctggttgcgatatttcgcatcttcacggcggttgtaaggtcgcaccgccgggccggaaagcggctcaaagctcagcgcaccaattaacatgcccggacgcagcgccagcggcagcttaccggagttgtagaactccagcacaatgcaaccagaccagcccggatcgatgcggtgcgcggtgacgtgcaccatcagccccagacgcgccagactggaacgcccgtccagccagcccaccagatcggctggcagcgtcacgctctccagcgtcaccgccagcgccagctctcctgggtgaagatagaacgcctcgccctcgtcgagaacgatctcatcgctcatcacgcggtcaagcgcggcgctcacttcatctttgggaccgctcagatcgataaacgctgccgtgtgaccacggaaggtacgaaatttattgcccaggcgtacatccaccgtcgcgccgttaatacgctccactggcggacgtgggttgatgctcaaacggccttcatcaagccaggcttcaatatctcggtcacacagacgcatggcattttctcctttcgcgcatcactcccttaacgccaattacgtcaagggcatactaggttatcactgaacggtacacaatttatcaagcttattcaaagaactgacttattttcgctttcaatatatcgatcgcgatgcggtttttcccgccgcgcggcacgataatgtccgcatattgtttagaaggctcaatgaattgcaggaacatcgggcgcacggttttttgatattgcgccatcacactatccatactacgcccacgctcgttaacgtcacgcttgatgcggcgcatcaggcagatatccagcggggtatcaacgaaaatggagaagttaagttcgtcacgcaaacgcgcatccgtcagcaacaaaatgccttcgagaatgatgaccttcttcggctcaaccgtcaccgtttctttcatacgcgtatgttcaacatagctgtaaaccggcaggtcaattgcgctgccgcgtttcaacgcttgtaaatgctcaagcagcagactgtgatccatcgcgctgggatggtcgtagttggtcttaacgcgttcttccatgctcagatggctttgatctttgtaatagcagtcttcgggaattacgccgatgtgttcatcaccgacttgctcacgcaattcacgataaagggtactggcaataagactcttgccggaagcgcttgcgccagcgataccgataatgacgcactgatgagactgatcagtcatatatttagcgacctgattaacctggatgttaggaagggggcgacgaagcgccaaacgcggcaattatagggatttcatccgtctgataccagtcgaatagcgttgccgcgcgctcagagttaattgttgacaaagaattcccgggggcaaattacgttgatcagttttatgtaaggtaaaaaatgttaaacgcagttgcgcaaattatccgcctttacgtcactttatgagcaattcgcatataaaatgtaaaacttttgtactagcataaacacagaaacgaatactggcgaccaggtcttgcggataaagcggtaatgagcaaacaaagtcagcatgtattaattgccctgccccacccgctgcttcacctggtcagtttaggtttagtcagctttatctttacccttttcagccttgagcttagccagtttggcacccaactcgccccactgtggttcccgacgtccatcatgatggtggcgttttatcgccatgccgggcgcatgtggccgggaattgcgctgagctgtagcctgggaaatatcgccgcatccatcctgcttttttccaccagcagcctgaacatgacctggacgaccatcaatattgttgaagccgtggtcggggcagtgctgctacgtaaattgctgccgtggtataaccccttgcaaaatctggctgactggctgcgtctggcactcggcagcgccattgttccgcctctgttggggggtgttctggttgtcctgctgacgcccggagacgatcctctcagggcatttttgatatgggtactgagtgaatccatcggcgctctggcactggtgccgctgggattgttatttaaaccacactatctgctgcgccatcgcaacccacggttgctttttgagagcctgctcacgttagccatcacactgacgttaagctggcttagcatgctgtatctgccgtggccttttactttcattattgtgctgttgatgtggagcgccgtgcgtctgccacgaatggaagcctttttgatcttccttaccacggtgatgatggtgagcctgatgatggccgcggatccccccctgcttgctacgccgcgtacgtacctgatgagccatatgccgtggctaccgtttttgctgatcctgctgcccgccaacatcatgaccatggtgatgtatgcctttcgtgcggaacgcaaacacatttccgaaagcgaaacccactttcggaacgcgatggaatattccgctatcggtatggcgttagtgggcaccgagggacaatggctgcaaaccaacaaagcgctctgccagtttctcgggtacagtcaggaagagctgcgcggactcacctttcagcaactgacctggccggaggatctcaataaagatctccaacaggttgaaaagctgataagcggtgaaataaacacctatagtatggaaaaacgctactacaaccgcaatggcgatgttgtctgggcgttgcttgccgtcagtctggtgcgccacacggatggcacgccgctctattttatcgctcagattgaagacattaacgagctaaaacgcaccgaacaggtcaatcagcaactgatggagcgcatcactctggctaacgaagcgggcgggattggcatctgggagtgggagttgaagccgaatatttttagctgggataagcggatgttcgagctgtatgaaattcctccacatatcaaaccgaactggcaggtgtggtacgagtgcgtgctgccggaagatcgccagcatgccgaaaaagtgattcgtgatagcttgcaaagtcgcagcccctttaaactggaatttcgcattaccgtaaaagacggtattcgccatatccgcgccctcgccaaccgggtactgaataaagaaggcgaagtcgaacgtctcctcggcatcaatatggatatgaccgaagtgaaacagcttaacgaggcattgtttcaggaaaaagagcgcctgcacattacgcttgattccatcggtgaagccgtggtctgtattgatatggcgatgaaaattacctttatgaatccagtggcggagaagatgagcggctggacgcaggaagaagcgttaggtgttccgctcctgacggtgttgcatattacttttggcgacaacggaccattaatggagaacatttacagtgccgacaccagtcgttccgcgatcgagcaagatgtggtgttgcactgtcggagcggcggcagttacgacgtgcattacagtattacgccgttaagtactctggacggcagcaatattggtagcgttctggtgattcaggacgttaccgaaagtcgcaaaatgctgcgccagctgagctacagcgcctcccatgatgcactgacgcatctcgccaaccgcgccagttttgagaaacaactgcgtatcctgctgcaaacggtaaacagtacacatcagcgacatgccctggtgtttatcgatcttgatcgctttaaagcggtgaatgacagcgccgggcatgcggcgggtgacgctttgctgcgcgaactggcgagcttaatgctgagtatgctgcgttccagcgacgtgctggcgcgactcggtggggatgaatttggtctgctgctaccagactgtaatgttgaaagcgcgcgttttatcgctacacgcattatcagtgccgtgaatgactatcactttatatgggaaggccgtgtgcatcgggtaggtgccagtgccgggattaccttgattgatgacaacaatcatcaggcggcagaagtgatgagccaggctgatatcgcctgttatgcctccaaaaatggtggccggggccgggtgacggtttacgaaccgcagcaagctgccgcacatagcgaacgggcggcgatgagccttgatgaacagtggcggatgattaaagagaatcagttgatgatgctcgcccacggtgtcgctagcccacggatcccggaagcgcgtaatttgtggctgattagtcttaagctctggagttgcgaaggcgagattattgatgaacaaacatttcgtcgtagcttcagcgatccggcgcttagccatgctcttgaccgccgggtattccacgaatttttccagcaggccgcaaaagcggttgccagtaaaggcataagcatctccctccccctttccgttgccggtttgagtagcgccacgctggtgaatgatctgcttgagcagctggaaaatagccctctaccaccacggttattacatctgattattccggctgaagcgattttagatcacgcagaaagcgtgcaaaaactgcggctggcgggatgtcggatagtgctcagccaggtgggccgcgatctgcaaatcttcaacagcctgaaagcgaatatggcagattacctgctacttgatggtgagttatgcgccaacgtgcagggtaatttgatggatgagatgctgattacgattattcaggggcacgctcagcgactcgggatgaaaaccatcgccgggccagtcgttttacccttagtgatggatacgctttctggcatcggcgtcgatctgatttatggtgaggtgattgccgatgcccaaccgctggatttgctggtgaatagtagttatttcgcgattaactgaggcgtgcttccccatcgcctgatgcgacgctaacgcgtcttatcatgcctacaaatcgctcattccccaggccggataaggcgctcgcaccgcatccggcgaccaacgtcatgcttcgtctggttgccagccttccgtataccagatatgcaacagcgcataagaacgccagggcttccagcgctcggcataacggcggatttgcgccggtgtcattcccggaaatcgctgtttaatcagataatcatccggcaggaaaacatctttcgcctgccagccacgcaaagcaaaataattcgccgtccagcgcccgatacccggaaaagtttgcagcgttttcatcgcctgctccacatcgcccggtattgtcattggtaaggtgccctccagcgccgcatttgccagatgaatcagcgcctctgcccgtttcaacggcatacctaacgcttttaatgcctgcgggtctgctgctgccagccgctgaggcgtcgggaagcagatatactccggaaaatcatccagccgttcgccataaagctgtgccactctggcggtcaattttgccgccatcgccacgctcaccagttggcctaaaatcgcccgcacgccctgctcaaaagcatcaacacagccgggtaaacgcaatccgggccgcgccgcgcctaacctgcccaacgcaccgttaacaatttgtgggttacattgcagatcaaacaggcggctcattttcgccagacactctgcggcaacaggttctaaacctgcacttaaatttatgtgcagagtatggcgggctatatccggaatagcagtcaccacgccgcgatattcgcccaccgccagactacgggcataataactgtccgcgaccgtttccacactgctcaccgcacgggcggcgagaaatcccaacatccagctccagtcatacggcggctgccagttcagggtatacatcgcatctccttattcatccgctttcagcataaacgttattcagacgctgcgctttgctttcatattccggttgtcgcgacggcaacatttcgctaaagtcacgccccttcttcaccggcatggggattatttcgtgtttattggttttgattacggtacagcaaactgtagtgtggcggtcatgcgtgacggtaaaccgcatttgctaaaaatggaaaacgacagcacgctgctgcctagtatgctttgcgcgccaacgcgtgaagcggtaagcgaatggctgtaccgccatcatgatgttccggcagacgacgatgaaacgcaggcgctgttacgtcgggcgattcgttataaccgcgaagaagatatcgatgttacggcgaaaagcgtgcagttcggtctttccagtctggcacagtacattgatgatccagaagaagtgtggtttgtgaaaagtccaaaaagcttcctcggtgccagcggcttaaaaccgcagcaggtagcgctgtttgaggatctggtctgcgcaatgatgttgcacattcgccagcaggcgcaggcacagctgccagaagcgattactcaggcggtgattggtcgtccgatcaacttccaggggctgggcggtgatgaagcaaacacccaggcgcaagggattctggaacgcgcggcgaagcgtgccggattcagggacgtggtattccagtacgagccggtcgcggctgggctggattacgaagccaccttgcaggaagaaaaacgggtgctggtggtggatatcggcggtggtacgactgactgtagtttgctgctgatggggccgcagtggcgtagccgtctcgatcgtgaagccagcctgctgggtcacagtggttgccgtattggcggtaacgatctggatatcgcgctggcgtttaaaaacctgatgccactgctgggtatgggtggcgaaaccgaaaaaggcatcgccctgccgatcctgccgtggtggaatgcggttgccatcaacgacgtacctgcgcagagtgatttctacagtagtgccaacggtcgtctgcttaacgatctggtacgcgatgcccgcgaaccggaaaaagtggccctgttacagaaagtctggcgtcagcgtttaagctatcgcctggtgcgtagcgcagaagagtgcaaaattgctcttagtagcgtagcggaaacccgcgccagtctgccgtttatcagcaatgaactggctacgctgattagccagcgagggctggaaagcgccctcagccagccactgacgcggattctggaacaggtgcaactggccctggataacgcccaggaaaaaccggacgttatctacctgaccggcggtagcgcccgttctccgctgattaaaaaagcgctggcagaacagttgccgggcattccgattgcaggcggcgatgactttggctccgtcaccgccgggctggcacgctgggcggaagtggtgtttcgttaattgaaaaatggctcagcagcggcttaaatctgcctgcgcctgagccagtttttctgctgcctgacgtaacggttccatcaacggcatggtccgtgctggagcatgaaggcggaatcgctgcaactctgtcgcgccgactgtcaacgcgctttccagccgatgtcgtttggcggtcattttcgccattaccgcttgtctgtctgctggcgttatcgcttcattcggcctgaacacaaaacggcgttcacagctcgctttccagtcgataaccgcctgggtcagatggtcgccaaaccctttcacttgcttaacgccacgacgggtaacatctgcggctgtttcaataccaaaagaccgtaacgccgctttacgcgcagggccaacgccgggaatagaggcaacatcaataaaaaatccctccagaaacttctgcttctgccgttcccttgcagtgtcatgaagtgctgccagagcgcgtttctcttcttccggtaacccgagaatttcgtccttcattttttcgagcatcgtccgtttggcgataaaaccttccaggccgcctacctgctggatctggcggactaaatggtcatagtccattttcgcacgattaaatgcctcacggcgttgctgaacttctgctttgtacgctttgcttgtcagactgccaataatccagatagccgccagcacaggaaccaaaataatataacgcggttctgcctgaaggccgcaaagcagcaggcttaatgcactcagtgcgatctcaagcagaatgatgtattcgcgccgtaacaggcctaaaggaagcggcctgccagtcggttggaaatgatcgggtaatggcagttgcaatgctggcggtgctacactcgccatcaccatcgcccagactttcgccagcacaaaattcccgccggtggtaatgacctcttcgccgagatcaataaaatagataacaccttgattatccagcgcacaccacgggcagtcagtcaaatgagcggggtaaacatgcattgcactaacgatacatttctttaactgttggcgtagagagtccagtgccgctacccacgctttagccgtcggacgcccggttgccacgccactttccgtgaatgcctgctgaaacatggcttcaacatcactcggtaacatgcttagcggaatagatcgtggcggcggttttaaaccacgtcgctgattatcactcgcgtaggcataacggaaatgggtaatatccgtctccagcgcattacccgcatcagagataagcggcacaccagaataaggatgccgcccaccaaacaagacgtgaaaaattagcaacgcaaggccaaaattatcgtgattttctgtgcgttcaaaaccgacaaaacttggcaaggtttgtagctctggcggcgtaaaatggctcacgccgacttcgcataaatgcagtgtgccattggcgttaatttgaaaggagtcgctatcaatcagtaccactttgctgtcgcgacctaccataaaactgttctggtttacgtcacccacgacgtgcccgtgctcgtgaaccgtagcaaaagaactagcaatattgcgcgcaacatagagtagaaaatcccacgcacaatgagggtaactctggcgacgatgtgccgggctatagatcatatgaatcggttctttaccagaaacttttggcatcataaaaccgataacttttccgcctcgtccaccgtgaagcgttgcctgcggccaggcgacataattcaacaactgcgcgtcagctgtcgcagccataaaggcaagtttgtcctgttttaaggcgggtggcggcgtgtgataaatcttggcgacgctatcgacaaactcctcgatatcataaaccgcgccttcaccacctttgcccagttcacggccaagagtggtcaattcacctgtgcttgtaaatacttttatatttgttttcataatatttcgcgggtagttatattatatttcaatgaataataacaactaaccattaaaattatttctatatggggaaaacccactcaagaataaaaatgataatgcaattttatcaggatacaattcaatttcggcctgataatgattaacttccacaggtttttgctaactttgactacaaagggattctggagaaaaaatgaaaaagatattacttatgttgagtctgctattttttactaccgcgggctttagtgaagttagcgatacgttagtgacgggaggttatgataaacaagcgatgtctgacgcgattaaacatgcgcggaaagaaaccgataaattcatcgaggttatgaataaaaaagatgccgatactttcgcagtcaaagccccgataaccgatcacggaagaaccgagcatttctggcttacggatgtcacttattctaacggcatgtttattggcgtaatcagcaatgaccctggtattgttacaaacgtagaatatggccaggagtggaaaatcaagaaagaagatattagtgactggatgtatacgcgcggggataaaatttacggcggttataccattgatcctttattggtcacctatccaaaagaagaagccgacgagctaagagcaaaattagttcgctaatcagccgttatatttattgtttaaactggcggttgaattgttgtcttcaaccgccatgagaaactcactctgcccacagcgccagtgccaacgttttatcatcatccgtacgctcgtttaccgccgggctggacaaaaactgctttaacaattcaggtaataaatcgagttgttcctgcgttgctgccgccagtccattgaaaaacggggtaaagaaaggcacatgaggagaattatccagcatatttaacgccagtcgctggataccatccgtaaatgctgcaactttgtgcgcacgcccagtgctggtgagagtttccagtctggaaacggcatcttcgtcggtaatgaagtgcgtcatgttggcatattcacccgccatcggcgtgagaggcaattgcagaccgtgacccaaatctaccaccacgccgccatcgccaatctgcataatcaaggtgccgtcagggctactaatcagtcccagaaatgtgcaggcaaaatcgcgaaccgctaattctttggcttccgcctcggcaaaaagtcgttgacgaatggtcagtaccatatttgtggcgaggacatcattaagccccaattccccgccctgcactttttggctcatataagccatcgcttcattgacggcgagcatcgcgccttcgccaccctggctgacactgcctgcgccatcagcgacaaatacgctcaataatggctgctggtcatttaaccaggcaatctgcatctggcaggcatcctgacaaggcaagtccgcgctgatgtggctcgttccaacggtacttgcatagaccagacgccagctcacacactcgtccagccttttggcgcttccagcacaacttccgttcccggcgtggagcgggaaacgctacgcaggctactggataaccagctaaacagttcacggaattgtaatccttgcagaggcaaaggctgacgaacgctaatttgtgccagcgtcttcatatccgccccctgaacaccgatggaaaagaaagcaaaccttttatcttcttccccccgaaacactttgttggctgcagcctgccactcatcggttggtgcaccatcggtaatcaggaaaatccacgggcgataatagctaataccatttgcacgatactcacgtttccgctcctctaccatatccagggctttggtaatggccgcacccattggtgtatcgccctgggcaaacaggatgggcggaaaaaaattagcggcgctggtaaagggttgttccacatgcaccgggccgaacgtcacaatgccgagttccactctttttaaagccagcggatcagcaagcagttcatcacgaaaggtaaccaatccggcgttaagttcattaataggtctaccgttcatagaaccagaaacatccagcagcaaaatgcaggggcaacgtggttccgggttactggcaaaatcgctggtggcaaacgtgatttgttcgctcataagaaatcctttcttagagaattatcgaggtccggtatcataccgactgcaataatgaaataagagcaaacgaagaaactttcagaattaggcccggcggcgcagaaaattttgctattcgcctcgcaagaacggagagccgtcgattgacactaagggcggagtgacataatttcaggagtgagggttagggagaggtttccccctccccctggtgttcttagtaagcctggaagctaatcactaagagtatcaccagtatgatgacgtgcttcatcataaccctttccttattaaaagccctcttctccgggagaggctttcccgtttcagcgtcccgctgaaatcatcggcttacctcctttcgccctgaatgcagtctatcgctaacgcgtgaataaaatagtttcctctgtgattattgcgtaacgactcgcaaagaatatttgctggcaggatcgcagactacaaagcctgcggattgacaatcttatcgtgaagacatactttcaggagtgagggtagagcggggtttcccccgccctggtagtcttagtaagcggggaagcttatgactaagagcaccacgatgatgagtagcttcatcatgaccctttccttatttatggccccttcctcgggaggggctttcccgtttcagcgtcccgctgaaatcgtcggcttacctcctttcgccatgcaagcagtctatcgctaacgcgtagataaaatagtttcctgtgttattactggatgcgtgctcgcaaatgtgcccgtcattcagacgattccagacagtgtttcataattcctccatttttctcccttattggctggctacactagtatcattccgcgaaacgtttcaggaagagaaactcttaacgatgaaaggtagttataaatcccgttgggtaatcgtaatcgtggtggttatcgccgccatcgccgcattctggttctggcaaggccgcaatgactcccggagtgcagccccaggggcgacgaaacaagcgcagcaaagcccagcgggtggtcgacgtggtatgcgttccggcccattagccccggttcaggcggcgaccgccgtagaacaggcagttccgcgttacctcaccgggcttggcaccattaccgccgctaataccgttacggtgcgcagccgcgtggacggccaactgatagcgttacatttccaggaaggccagcaggtcaaagcaggcgatttactggcagaaattgaccccagccagttcaaagttgcattagcacaagcccagggccaactggcaaaagataaagccacgcttgccaacgcccgccgtgacctggcgcgttatcaacaactggcaaaaaccaatctcgtttcccgccaggagctggatgcccaacaggcgctggtcagtgaaaccgaaggcaccattaaggctgatgaagcaagcgttgccagcgcgcagctgcaactcgactggagccggattaccgcaccagtcgatggtcgcgttggtctcaagcaggttgatgttggtaaccaaatctccagtggtgataccaccgggatcgtggtgatcacccagacgcatcctatcgatttagtctttaccctgccggaaagcgatatcgctaccgtagtgcaggcgcagaaagccggaaaaccgctggtggtagaagcctgggatcgcaccaacagcaagaaattaagtgaaggcacgctgttaagtctagataaccaaatcgatgccactaccggtacgattaaagtgaaagcacgctttaataatcaggatgatgcgctgtttcccaatcagtttgttaacgcgcgcatgttagtcgacaccgaacaaaacgccgtagtgatcccaacagccgccctgcaaatgggcaatgaaggccattttgtctgggtgctgaatagcgaaaacaaggtcagcaaacatctggtgacgccgggcattcaggacagtcagaaagtggtgatccgtgcaggtatttctgcgggcgatcgcgtggtgacagacggcattgatcgcctgaccgaaggggcgaaagtggaagtggtggaagcccagagcgccactactccggaagagaaagccaccagccgcgaatacgcgaaaaaaggagcacgctcctgatgcaggtgttacccccgagcagcacaggcggcccgagccgcctgtttattatgcgtcctgtggccaccacgctgctgatggtggcgatcttactcgccgggattatcggttatcgcgccctgcccgttagcgcgctgccggaagtggactatccgaccattcaggtggtcacgctctacccaggtgccagcccggatgtcatgacctctgccgttaccgcgccgctagaacgccagttcgggcagatgtctggcctgaaacagatgagcagccaaagttccggcggtgcgagtgttatcactttgcagttccagctaacattaccgctcgatgtcgccgagcaggaagtgcaggccgcgattaacgctgcgaccaacttgttgccgagcgatctgcctaacccgccggtttacagcaaagtgaacccggcagatccgccgatcatgacgctcgccgtcaccagtaccgccatgccgatgacgcaagtggaagatatggtggaaacccgcgtcgcgcagaaaatcagccagatttccggcgtcggcctggtgacgctttccggcggtcagcgtccggctgttcgcgtcaaacttaacgctcaggcgattgccgccctcggcctgaccagcgaaaccgtgcgcaccgccattaccggcgctaacgttaacagcgcaaaaggtagcctcgacggcccttcccgtgcggtcacgctttccgcgaacgaccagatgcaatccgccgaagagtatcgccagctaatcatcgcctaccagaacggcgcgccaattcgtctgggcgatgtcgcaactgtagagcaaggtgcagaaaacagctggctcggcgcgtgggcgaacaaagaacaggccattgtgatgaatgttcagcgccagcccggtgctaacattatctccaccgccgacagcattcggcagatgctgccacagctcactgagagtctgccgaaaagcgtgaaggtgacagtgctttccgatcgcaccaccaatatccgcgcatccgtcgatgatactcagtttgaattgatgatggctatcgcgctggtagtcatgattatctacctgtttttgcgcaatattccggcgaccatcattcccggtgttgctgtaccgctgagcttaatcggcactttcgcggttatggtgtttctcgattttagtatcaataacctgacactgatggcgttaactatcgccaccggattcgtggtcgatgacgccatcgtggtgatcgaaaacatttcccgctatatcgaaaaaggcgaaaaaccgttggcggcggcgctcaagggcgcaggtgaaatcggctttaccattatcagcctgaccttcagtctgattgcggtgttgatcccactgctgtttatgggcgatatcgtcgggcgactgttccgcgaatttgctattaccctggcggtagcgattttgatcagtgcggtggtgagcctgaccctgacaccgatgatgtgcgcgcggatgctcagccaggagagcttgcgtaaacagaaccgcttctcccgtgccagcgaaaaaatgttcgacaggataatcgccgcctatggtcgtggactggcgaaagtgctgaatcatccgtggctgaccttaagcgtggcactcagcacgctgctgcttagcgtgctgctgtgggtgttcattccgaaaggtttcttcccggtacaggacaatggcattattcagggcactttgcaggcaccgcaatccagctcctttgccaatatggcccagcgacaacgccaggtcgcggacgtgattttgcaggatccggcagtgcaaagcctgaccagttttgttggcgttgatggcactaacccgagcctgaacagtgcacgtttacaaatcaacctcaaaccgttggatgaacgtgatgatcgggtgcaaaaagtcatcgcccgtctgcaaacggcggtagataaagtgccgggcgtcgatctcttcctgcaaccaacgcaggatctgactattgatactcaggtcagccgcacccagtaccagtttaccttgcaggccacgagtctggatgcgctcagtacctgggtgccacagttgatggaaaaactccagcaactgccacagctttctgatgtctccagcgactggcaggacaaagggctggtggcgtatgtcaatgttgatcgcgacagcgccagccgtctggggatcagcatggcggatgtcgataacgccctgtacaacgcgtttggtcagcggctgatttccactatttatactcaggccaaccagtatcgcgtggtgctggagcacaacaccgaaaataccccaggcctcgcggcgctggataccattcgcctgaccagcagcgacggcggcgtggtgccgctaagcagtattgccaaaattgagcagcgttttgcgccgctctccatcaaccatctggatcagttcccggtaacgaccatctcctttaacgtgccggataactatagcctgggcgatgcggtgcaggcgattatggacaccgaaaagacgctgaatctgccggtggatatcaccacgcagttccagggcagcaccctcgccttccagagcgcgctgggcagcactgtctggctgattgtcgcggcggtggtggcgatgtatatcgtgctcggcattctgtacgagagctttattcacccgatcaccattctcagcacgctacccaccgcaggggttggcgcactgctggcgttgctgattgctggtagcgaactggatgtgattgcgattatcggcattattttgctgatcggtatcgtgaagaagaacgccatcatgatgatcgacttcgcgctggctgctgagcgcgagcaaggcatgagcccgcgcgaggcaatctaccaggcttgtctgttgcgttttcgtccgatcctgatgaccactctggcggctctgcttggcgcgctgccgctgatgttgagtaccggggtcggcgcggaactgcgtcgtccgttaggtatcggcatggtcggcggtctgattgtcagccaggtgctgacgctgtttaccacgccggtgatttatttgctgttcgaccgcctggcattgtggaccaaaagccgctttgcccgtcatgaagaggaggcgtaagtgaagttttttgccctcttcatttaccgcccggtggcgacgattttactgagcgttgccattaccctgtgcggcatactgggcttccgtatgctgccggtcgccccgctgccgcaggtcgattttccggtgattatcgtcagcgccagcctgcccggtgcgagtccagaaacaatggcgtcttccgttgccacgccgctggagcgcagtcttgggcgcattgccggagtcagtgaaatgacctccagcagtagcctcggcagcacgcgtattattttgcagtttgattttgaccgggatatcaacggcgcagcgcgtgatgtgcaggcggcgatcaacgctgcacaaagtttgctgcccagtgggatgcccagccgcccgacctatcgcaaagcgaacccgagcgatgcgccaattatgatcctcacgctgacgtccgatacttatagccagggtgaactgtacgatttcgccagcacgcagctggctccgacgattagccaaatcgacggtgttggtgatgtcgatgtcggaggcagcagtctgcccgccgtacgcgtcgggctgaatccgcaggcgctgtttaatcagggcgtgagcctggacgacgtacgcaccgccgtcagcaatgccaacgtgcgtaaaccgcagggcgcgctggaagatggcactcaccgctggcagatccagaccaatgatgagctaaaaaccgccgctgaatatcagccgttgattattcactacaacaacggcggcgcggttcgtctgggcgatgtggcgacggtgaccgacagtgtgcaggatgtgcgcaacgccgggatgaccaacgccaaaccggctattttactgatgatccgcaaactgccggaagccaatattatccagacggttgacagcatccgggcaaaattaccggagttgcaggaaaccattccggcggcgattgatctgcaaattgcccaggatcgctcccccaccattcgcgccagcctggaagaagtcgagcaaacgctgattatcagcgtggcgctggtgattctggtggtgtttttattcctgcgcagcggtcgcgccactattattcccgccgttagcgtgccggttagcctgattggtacgtttgcggcgatgtacctgtgcggattcagtctcaataaccttagcttaatggcgctcaccatcgctactggtttcgtggtggatgacgccatcgtggtgctggaaaacattgcacgtcatctggaagcgggaatgaaaccgttgcaagccgcactgcaaggtactcgcgaagtcggttttacggtgctgagcatgagtctgagtctggtggcggtgttcctgccgctgctgttgatgggcggattgccgggccgactgttacgcgaatttgccgtgacgctttctgtcgccattggtataagcttgctggtttctctgacattaacgccaatgatgtgtggctggatgctgaaagccagcaagccgcgcgagcaaaagcgactgcgtggttttggtcgcatgttggtagccctgcaacaaggctacggcaagagtctaaaatgggtgctcaatcatacccgtctggtgggcgtggtgctgcttggcaccattgcgctgaatatctggctgtatatcagcatcccgaaaaccttcttcccggagcaggacactggcgtgttgatgggcgggattcaggcggatcagagtattagctttcaggcgatgcgcggtaagttgcaggatttcatgaaaattatccgtgacgatccggcagtggataatgtcaccggctttacaggcggtagccgagtgaacagcgggatgatgtttatcaccctcaagccacgcgacgaacgcagcgaaacggcgcagcaaattatcgaccgtctgcgcgtaaaactggcgaaagaaccgggggcgaatctgttcctgatggcggtacaggatattcgcgttggtgggcgtcagagcaacgccagctaccagtacacgttgttatccgacgacctggcggcactgcgagaatgggagccgaaaatccgcaaaaaactggcgacgttgccggaactggcggacgtgaactccgatcagcaggataacggcgcggagatgaatctggtttacgaccgcgacaccatggcacggctgggaatcgacgtacaagccgccaacagtctgttaaataacgccttcggtcagcggcaaatcagcaccatttaccagccgatgaaccagtataaagtggtgatggaagtggatccgcgctatacccaggacatcagtgcgctggaaaaaatgttcgttatcaataacgaaggcaaagcgatcccgctgagctatttcgctaaatggcaaccggcgaatgccccactaagcgtgaatcatcagggattaagcgcggccagcaccattagctttaacctgccgaccggaaaaagcctcagcgacgccagtgcggcgatcgatcgcgcaatgacccagcttggtgtgcctagcacggtgcgcggcagttttgccggcacggcgcaggtgttccaggagacgatgaacagccaggtgatcctgattatcgccgccatcgccacggtgtatatcgtgctgggtatcctttacgagagttacgtacatccgctgacgattctctccaccctgcccagcgcgggcgttggagcgctgttggcgctggagctgttcaatgccccgttcagcctaatcgccctgatagggatcatgctattaatcggcatcgtgaagaaaaacgccattatgatggtcgattttgcgcttgaagcccaacggcacggtaacctgacgccgcaggaagctattttccaggcctgtctgctgcgttttcgcccgattatgatgactaccctggcggcgctgtttggtgcgctgccgctggtattgagcggcggcgacggcagcgagctgcggcaacccctggggatcaccattgtcggcggactggtaatgagccagctccttacgctgtataccacgccggtggtgtatctctttttcgaccgtctgcggctgcgttttagccgtaaacctaaacaaacggtaaccgagtaaatgacagatcttcccgacagcacccgttggcaattgtggattgtggctttcggcttctttatgcagagcctggacaccaccatcgtaaacaccgcccttcccagtatggcgcaaagcctcggggaaagtccgttgcatatgcacatggtcattgtctcttatgtgctgaccgtggcggtgatgctgcccgccagcggctggctggcggacaaagtcggcgtgcgcaatattttctttaccgccatcgtgctgtttactctcggtagtctgttttgcgcgctttccggcacgctgaacgaactgttgctggcacgcgcgttacagggcgttggcggcgcgatgatggtgccggtcggcagattgacggtgatgaaaatcgtaccgcgcgagcaatatatggcggcgatgacctttgtcacgttacccggtcaggtcggtccgctgctcggtccggcgctcggcggtctgctggtggagtacgcaagctggcactggatctttttgatcaacattccggtggggattatcggtgcgatcgccacattgctgttaatgccgaactacaccatgcagacgcggcgctttgatctctccggatttttattgctggcggttggcatggcggtattaaccctggcgctggacggcagtaaaggtacaggtttaagcccgctgacgattgcaggcctggtcgcagttggcgtggtggcactggtgctttatctgctgcacgccagaaataacaaccgtgccctgttcagtctgaaactgttccgtactcgtacctttagcctgggcctggcggggagctttgccggacgtattggcagtggcatgttgccctttatgacaccggttttcctgcaaattggcctcggtttcagcccgtttcatgccggactgatgatgatcccgatggtgcttggcagcatgggaatgaagcgaattgtggtacaggtggtgaatcgctttggttatcgtcgggtactggtagcgaccacgctgggtctgagcctggtcaccctgttgtttatgactaccgccctgctgggctggtactacgttttgccgttcgtcctgtttttacaagggatggtcaacagcacgcgtttctcctccatgaacaccctgacgctgaaagatctcccggacaatctggcgagcagcggcaacagcctgctgagcatgattatgcaattgagcatgagtatcggcgtcactatcgccgggctgttgctgggactttttggtagtcagcatgtcagcgtcgacagcggcaccacacaaaccgtctttatgtacacctggcttagcatggcgttgatcatcgcccttccggcgttcatctttgccagagtgccgaacgatacgcatcaaaatgtagctattagccggcgaaaaaggagcgcgcaatgaagttctggcgacccggtattaccggcaaactgtttctggcgattttcgccacctgcattgtcttgctgatcagtatgcactgggcggtgcgtatcagttttgagcgtggctttattgattacatcaagcatggtaatgaacagcgattacaactgttaagtgatgcgcttggcgagcagtatgcgcagcatggcaactggcgcttcctgcgcaacaatgatcgctttgtctttcagatcctgcgtagttttgaacacgataatagcgaagataaacccggcccgggtatgccaccgcacggctggcgtacccagttctgggtggttgatcaaaacaacaaagtgctggttggtccgcgagcgccgattccacctgacggtacacggcgacccattctggtcaacggtgcggaagttggcgcggtgatcgcctcccccgttgagcggttaacgcgcaatactgatatcaatttcgataaacaacagcggcaaaccagctggttgattgtcgccctggcaacgttactcgcggcacttgccacttttctgctggcgcgcggtttactggcaccggtaaaacgacttgtcgatggcacgcacaaactggcggcgggcgatttcactacccgcgtaacgcccaccagtgaagatgaactgggcaaactggcgcaagacttcaaccagcttgccagcacactggagaaaaaccagcaaatgcggcgcgattttatggccgatatttctcacgaactgcgtacgccattagcggtgctgcgcggtgaactggaagccattcaggatggcgtgcgtaaattcacgccggagacggtggcgtctttacaggcggaggtcggtacactgaccaaactggttgacgatctccatcagttgagcatgtctgatgaaggcgctctcgcctatcaaaaagcaccggtagatttgatcccactgctggaagtggcgggcggcgcatttcgcgaacgattcgccagtcgtggcctgaaactgcaattttccctgccagacagtattaccgtatttggcgatcgcgaccgtttaatgcagttattcaataacttactggaaaacagcctgcgctacactgacagcggcggcagcctgcaaatctctgccgggcagcgcgacaaaacggtgcgcctgacctttgccgacagtgcgccaggtgtcagtgacgatcagctacaaaaattgtttgaacgtttttatcgcaccgaaggttcccgcaaccgtgccagcggcggttccgggctggggctggcgatttgcctgaacattgttgaagcacataatggtcgcattattgctgcccatagcccttttggcggggtaagcattacagtagagttaccgctggaacgggatttacagagagaagtatgaccgagttaccaatcgacgaaaacacaccgcgtattttgatcgtggaagatgaaccgaagctggggcagttgctcattgattatctgcgtgctgcgagctatgcgccgacgcttatcagccacggcgatcaggtactgccgtatgtgcgccagacaccaccggatctgatcctgttagatctgatgctccctggcaccgatggcctgacgctgtgccgggaaattcgtcgtttttctgacattccgatcgtgatggtgacggcaaaaatcgaagagatcgatcgcctgctggggctggagattggcgcagatgattatatctgtaagccgtacagcccacgggaagtggtagcgcgcgtcaaaaccattttgcgccgttgcaaaccgcagcgcgagttgcagcaacaggatgctgaaagcccgttgattatcgacgaaggtcgttttcaggctagttggcgcggtaaaatgcttgacctgacgcctgcggaatttcgtctgctgaaaacgctctctcacgaaccaggaaaagtgttctcccgcgagcaattgctcaatcatctttatgacgactaccgcgtagtaaccgaccgcaccatcgacagccacattaaaaacctgcgccgcaagctggaatctctcgacgccgaacagagttttatccgcgccgtttatggcgtcggttaccgctgggaagccgacgcctgccgcatcgtttaattttagcgacattattttgttagccggagatggcgttcagaccagatccggcaacattatcccacgcatggtcagcaaactgacattatctctccgccctggcaggcatcagaaaatcgctcatactttaatcggtaaacagcacctttagaatcctgtcgtttgttttcgatttcaaaatataatgaaattatttgtttttaaatatcgagataacgatcacaaaaacgacaatatgaaaattattcgaggagtgaaaggcaaaaaaacggcctcccgatagggaagccgtagcaaagtgcgcgtgtttttatgccggatgcggtgtaaacatacgtggcagtgctatgtaggcatgataagacgcttcagcgtcgcatcaggcataggttgccggatgcagcgtaaacgccttatccgtcctacggggtggtgttgttcgtataaggcgtatcaggcgatagtaattttgctatcgagataaacgtcctgcacggcgttaatcagtttcacgccgtcagccatgcttttcttgaacgctttacgtccaagaatcagccccattccgcctgcgcgtttgttgataaccgcagtacgcactgcatcgctgaggtcagtttcaccgcccgcagcaccgccggagtttatcaacccagcccgacccatatagcagttagctaactgataacgcaccagatcaatcgggttttcgctggtcaatttgctgtaaacacgatcgtcggtgtaaccgtaattaattgctttatagccgccgttattttccgccattttttgtttgacgatatctgcaccgatggttgccgccagatggtttgcctgaccggtcaggtcggcggaaacatggtaatcaacgccatctttcttaaaggcggagttacgcaaataggcccacagcactgtcaccatacccagctcgtgcgcacgttcaaaagccgcagaaatttcttcaatctggcgacgactctcttcgctgccaaaatagatagtcgcaccaaccgcaaccgcgcccatgttgaacgcctgctccacgctggcatacagcgtttgatcgtaggtattcgggtaacttagcgtctcgttgtgattaagtttgacgaggaatggaatgcgatgcgcataacgccggcttacgctcgccagcacgccgtaagtactcgccacacagttacagcccgcttcgatcgccagttcaacaatgtttttcgggtcaaagtagagcgggttagcagcaaaactagctccggcagagtgctcaacgccctggtcaaccggcagaatagaaagatatcctgtgccagccagacgcccggtgttgtacaacgtctgcatattacgtaacaccgctggcgggcgattattgtcaatcattacgcggtctacgtagtcatgtccggggagataaagctggtcagaaggaattgtcatacaacggtgctgtaaaaggttgtcggcgtctttgccaagcaactgcgcaatatctgtcattactatgctcccgtaaattccgattggatatcggctatggattgtcctggcccgccttttgcgggcaatcataatcctggtcgttacgggcgagtttttccatcttttggatgttttttcagcgttttctgttggctcgattcatcagaaaaaatgttagcgcggtcaagttttcaccgcaaaggtatttaaaaggtattattaagtggtattgtcatcgcgtaccttacattacctgtcatgaaggaattaaaagatgaaaacaacagcaaagctgagcttcatgatgtttgttgaatggtttatctggggcgcgtggtttgtgccattgtggttgtggttaagtaaaagcggttttagtgccggagaaattggctggagctatgcctgtaccgccattgcggcgatcctgagcccaattctggttggctccatcactgaccgctttttcagcgcgcaaaaagtgctggcggtattgatgttcgcaggcgcgctgctgatgtatttcgctgcgcaacagaccacttttgccgggttcttcccgttactgctggcctacagcctaacctatatgccgaccattgcgctgactaacagcatcgcttttgccaacgtgccggatgttgagcgtgatttcccgcgcattcgtgtgatgggcactatcggctggattgcctccggtctggcatgtggtttcttgccgcaaatactggggtatgccgatatcagtccgactaacatcccgctgctgattaccgccggaagttctgctctgctcggtgtgtttgcgtttttcctgcccgacacgccaccaaaaagcaccggcaaaatggatattaaagtcatgctcggcctggatgcgctgatcctgctgcgcgataaaaacttcctcgtctttttcttctgtagtttcctgtttgcgatgccactagcgttctattacatctttgccaacggttatctgaccgaagttggcatgaaaaacgccaccggctggatgacgctcggccagttctctgaaatcttctttatgctggcattgccgtttttcactaaacgctttggtatcaaaaaggtattattgcttggtctggtcaccgctgcgatccgctatggcttctttatttacggtagtgcggatgaatatttcacctacgcgttactgttcctcggtattttgcttcacggcgtaagttacgatttttactacgttaccgcttacatctatgtcgataaaaaagcccccgtgcatatgcgtaccgctgcgcaggggctgatcacgctctgctgccagggcttcggcagtttgctcggctatcgtcttggcggtgtgatgatggaaaagatgttcgcttatcaggaaccggtaaacggactgactttcaactggtccgggatgtggactttcggcgcggtgatgattgccattatcgccgtgctgttcatgatttttttccgcgaatccgacaacgaaattacggctatcaaggtcgatgatcgcgatattgcgttgacacaaggggaagttaaatgaaaacagaacgtattctcggtgctctttatgggcaggcgttaggggatgcgatggggatgccctccgagctttggccacgcagccgcgttaaagcacactttggctggattgaccgttttcttcctggaccaaaggagaataacgcggcctgttattttaaccgcgccgaattcaccgacgataccagcatggcgctgtgtctggcggatgcgttactggaacgtgaaggcaagatcgatccggatctgattgggcgtaatattctcgactgggcgctgcgtttcgacgcctttaacaaaaacgtactaggtccgaccagcaagattgcgcttaacgccattcgcgacggtaaacccgttgctgaactggaaaacaacggcgtgaccaacggcgcagcgatgcgcgtcagcccattaggttgtttgcttccggcgcgtgatgttgattcctttattgatgatgtagcgctggcgtccagcccgacccataaatccgatctggcggttgcaggcgcggtagtcatcgcatgggcgatttctcgtgccattgacggagaaagctggagtgcgattgttgattccctgcctagtattgcgcgacatgcacagcaaaaacgcatcactacgttcagcgccagtctggcggcgcggctggagattgcgctgaaaattgtgcgcaatgccgacggcaccgaatccgccagcgaacagctttaccaggtcgttggcgcaggtaccagcactattgagtccgttccgtgcgccattgcgctggttgaactggcacaaaccgacccgaatcgctgcgccgtcctgtgcgctaaccttggcggcgacacagacaccatcggtgctatggcgacggcaatttgcggcgcgttgcatggcgttaacgctatcgatcctgcgttaaaggcggaactggatgcggtaaatcagcttgatttcaaccgctatgccacagcgctggcgaaatatcgtcaacaacgggaggcggtatgagcggcgctcgattacacacgctgctgcctgaattaaccacgcgtcagagcgtgatggtcgtcggcgcggcggtcattgacgtgatcgccgacgcttatgccctcccctggcgtgggtgcgatatcgaactgaaacagcagagcgttaacgttggcggctgcgcactgaatattgccgtggcgttaaagcgcctcggcatcgaagcgggtaatgccttgccgctcggtcagggcgtgtgggcggagatgattcgcaaccggatggcaaaagagggcttaatcagcctgatcgataacgccgaaggtgataacggctggtgtctggcgctggttgagccggatggcgaacgcacttttatgagtttcagcggtgttgaaaatcagtggaatcgccagtggctggcgcgattaaccgttgcgcctggcagcctgctctatttttccggttatcaactggccagcccctgcggcgaattgttagtggaatggctggaagagctgcaagacgtgacgccgtttatcgattttggcccacgtattggcgatatcccggatgcattactggcgcggatcatggcctgtcgacctttagtgagcctcaatcgtcaagaggctgagattgccgccgaacgttttgctttatccgcagagataacaacacttggcaagcaatggcaggagaaatttgccgcgccgttgatcgttcgtctcgataaagaaggcgcatggtatttcagcaacgacgcttctggctgcattccggcatttccaacgcaagttgtcgacaccattggggcgggcgacagtcatgccggtggcgtacttgccgggctggcctctggtctgccactggcggatgccgtattactgggcaatgcagtggcgagctgggttgtcgggcatcggggcggtgattgtgcgccaacgcgcgaggaactactcctcgcacacaaaaacgtataattactcctcgcacacaaaaacgtatagatcgctgcgacagtggctaatgctgtactcaataggccgttgctgttggtcaagcgccacttgcttgatcaccagcaccggtattttgctatctaactgaatatgactctgaaactcggcatccggcatccgggcgctaacgcgggaacgcgtacgttgtgggtaaatgtgctggctgcggaaatagtcataaagactaatcccgatggcatcaacatcatgaattaaatgcgccggaacccagctttcctcaatgcttaccgcttcttcatcgacatagcgaatacgcttaagcaaaaagacatcacttcctgcttcgaccgccagctgctgcgcgacttcttcgggacatttcacgacacgcttgttaacccatagcgtatcgggctttttcccgcgcaataccacctgctgagaaaaacctcgcgcttctttcaagctgtattcgaagatgttgttgatctgcgtgccgtaaccgcggctacgcgtcaccacaccctcttcttccagcgcctgcatcgccttgcgcaccgtaatgcggctaacgccggttaactgacttaaatcacgttcaccgggcaaaatattgccatgctccagcaccccgctgcgcacggcattttttaccgtttcggcaaacttaatataaagcggcgtgttatccgccgctaaaatacgctcgttcagttgggcaatcagctgggtatgcgcttgttccatttgtctttttcctgccggggagtctggtgggagtatatcactgcttcttatttaaggcgtttctttaatcccatcaacgaatgcctgcaactcctccaccgtgccattaaatacattaaaatccaccggaccattgatgccatctacctgtccacggtcggaatgctgccagaagcgccaggccattccgtcattgtccggacgacgttgatagtagtgagccacccaccacggatattcattgaaatagcccgccagattggtgtgataaaaaacggctccactgtaaataatcggctttttccccgtacttttttcgaccatttttagccactgacttacccgcttgcgtaattcttttgcgcttaattttccccgttcttctacgtccagcacggcagggaaatcgccttgactgaaatccaccgtttgcagaaataatctcgcctgaacactagcggatacgctcggggagaaataatgatacgccccacgcagcaggccattttcgcggcttagttgccagttacggctaaaataggggtccaccagcttttcgccttccgtcgccttaataaaagcaaactgtaagcggataccattgtcgcgcatttttgccacccgctgccagtcgatccgctcctgccagcggctaacatctattccgtgaatggtgtaactggcaggaatgcgaatagcgaaagatttaaccgggcgataaccgtagaagtggatgtagtctgtaatctgaactgctgtgctatagaaaaaattcaccgtctgacgcggataaattgcaacgatggaaattagcccaagagcgcataatagagaggtgagtttttttcgactggtaattcttagctgcattggtttcatccctgaatgtcagtgccaaaggctgacaataaccaaagcagctatagtacggtgctcaccaccaggcgtggaagtggtgaaccggaccaataccgtgaccaacttccagcgtgtcggcctgggctaacgcgctactaagccagctttttgcctcctgtacggtgtcagcccagtttgtatggcgcgggcgtagtgcagccaacgccgcagagagtgtacaaccagtgccgtgggtgtttttggtcataatgcgcggtgcggtaaaccgttgttcaccctcgcgggtaaacagccagtccgggctttgctcatcatccagatgaccacctttcattagcactgcgccacagcccatcgccaacaggcttcgcccttgttccagcatttcctgttcggtgcgcgcgtgtggcgcgtcgagcaaggcggcagcttcgggcaagtttggcgttattaaactaacctgtggcaataatcgactgcgcagcgtagcaaccgcgctaggactaagcagcgggtcgccgctttttgccagcataacggtgtcgagtaccacgttttggatctgataacgttgcaaccgttctgccaccgcttcaacaatatcggtttccgccagcataccgattttagtggtatcgattcgcacatcgctgaacacgctatcgagctgggcggcgacaaaatcaggctcaatgcgatacacgctctgtacgccacgggtattttgcgccaccagtgcagtaataacactgcaaccataagcgccaagtgcgctgaaggttttaagatcggcctgaatccccgcaccaccactcggatcagtaccggcaatcgtcagagcgttaattcgtttcatgcctgcacctcctgcgtcaattgccagagcgcatcaaggaaatgtggaacaaaactgcctggcccctcgcttctggcgactgcgcgttctccggcttgtttcatccagtgacaggcagatgcgacattttccagcgtatcgcctggtaacgcacagcaggcagcgacaaccgcgcttaatgcacagccagttcctaccactttggtcattaacggatcaccaccgtgaataccaatgatacgatgtccatcggtaacataatccatctcgccagtgaccacgacgattgcgccagtttcccgtgccagtgtttgtgcagcgggtatcgcgttagctgcggcgtcagtggtatccactccccgtccgccattagcaatgccagctaatgccatgatttcgctagcattaccacgtatcgctgccggtttaaaagataaaagttcatgacaaaaatggcggcgataatcgagcgcacccaccgctactggatcaagcgtccagggtgtttgagagctttttgcttgctcaacggcagcacgcatcgcctgagcgcgtggctgcgtcagtgtgccaacgttaatcaacaaggcactggcgatagccgcaaactgactggcctcttcggtttcgataaccatcgctgggcttgcaccgagcgccagcaaggtattggcggtaaaggtttgcaccacatcattggtcatgcagtgcacaagaggggaatgttggtgaaaaaggtgtaacgcgtgcgcagattgcgcactacccagcaggtcgacttgcatagtttgctcctgccataacgtgaagaagcaatgacctggtggtccgtgacttccctacgctggcattatccagatcaggtgatacgggtatttctcagccttcacgcagaagggcaccccgagtcgtttggttgcgatgataaatcgcagaggaggatggtaatgtccagcgcacgcgttgtaaacgaggaaaaacggcagttttacaatcgcgttaataaattatttgatataactatccagcaccttcagaacgacatccagatcttcttcacgttttagctcatccccctggtgaacgatgtgttccgtcagatgacctttaatcacttcccgcatcagaccgtttaccgcgccacggatagcagcaatctgttgtaaaactgcagcgcattcgtgcggctcgtcgagcattttcttgagcgccacgacctggccctgaatcttactggcacgcgctttcagtttctgtttatcacggattgtatgagacatggcaacacctggttaacaagaatatgaaaaatcatagcactattaatctactggggggtagtatcaggtactgggggggagtagaatcagattgccgaattaatactaagaattattatcatgaccgaatttacaactcttcttcagcaaggaaacgcctggttcttcatccccagcgccatcttacttggtgcgcttcatggcctggaaccagggcacagtaaaacgatgatggcggcgtttatcatcgccatcaaaggcaccattaaacaagcggtgatgctcggactggcagcaactattagccataccgcagtggtctggttaattgcctttggcgggatggtgatcagcaagcgctttactgctcaaagtgcagaaccgtggctccagctgatttccgcagtgatcattattagcaccgcgttctggatgttctggcgtacctggcgcggcgaacgcaactggctggagaatatgcacgggcatgattatgagcatcatcatcacgatcacgaacatcaccacgaccatggacatcatcaccatcacgaacatggcgagtatcaggatgcccatgcacgagcccatgccaatgacattaaacgacgctttgatggtagagaggtcaccaactggcaaattttgttatttggcttaaccggtggccttatcccctgcccggcagcaattaccgtgctgttgatatgcattcagttgaaagccctgacactgggcgcaacactggtcgtcagtttcagcattggcctggcgttaacgcttgtcaccgtaggcgttggcgcagcaatcagcgttcagcaggtcgcaaaacgctggagcggatttaacactctcgctaaacgcgccccctatttttccagtctgttgattggcttagtcggtgtgtatatgggcgtacatggcttcatgggcataatgcgataactcaatcctttaggcttgcatgttatcttcagcccaggatgattcttaaatcagctatttccgctgactctctgctcgctaaggatgcttttagggcatcctttcatttacactttttacgaaatcatgggatcactaacaaaatatcgcttgtcagttatattgtatggcaggaaagatatgcgactgatattacagatccccaaagtggagagtttatgaccattaaaaataagatgttgctgggtgcgcttttgctggttaccagtgccgcctgggccgcaccagccaccgcgggtagcaccaataccagcggaatttctaagtatgagttaagtagtttcattgctgactttaagcatttcaaaccaggggacaccgtaccagaaatgtaccgtaccgatgagtacaacattaagcagtggcagttgcgtaacctgcccgcgcctgatgccgggacgcactggacctatatgggtggcgcgtacgtgttgatcagcgacaccgacggtaaaatcattaaagcctacgacggtgagattttttatcatcgctaaaaaaagccccctcatcatgagggggaaatgcagacaccttgttattttttattattagccacttgctcgtcttgcttgttattagtcgtatttcacgttgattaatgcggttgcctccagtgcgccagatttaactttgtttgtatcgtagacgtagtaactggctgttatcggaatactaaccgttgtatctgtaagtttactcttcgccgcaacttcctttaaatttgtatatcctttactgctgttagtgatatttaaaagtgtgactgggctaccattactttcaagaataaatcctacgccattatcttccgcacctttcagtattgtgttgctgttggttaacaagtcagaactacttaaatacacctgcattttccgacttgtttgattttgttgacctaataaatttttacaacgcagaataatatccccttgtttactatttattgttgctttgttacctgtggctggtaattgactaacgggaatactgtctaaagtaattaataaatcgtccggtttgcaggttgtggttatcgggttgtaactcaatgtcagattaaaggaatagacacctgcattttgtgccaatgcatttctgtagctatttacacatgcatcccaactcttgccacctaataaacacagtagaaattgtactgcggcactcccgcgtgtgctactactagcactggataatgtcgcaacaccattaatcatcacactaccgccgccccccgcagaaacattcacttttgcattactggccgcaggtgtcaccgtaacactataaccactggtgaaactggtctgattattactcaacgtgatgttgtttttattggtccattcaaaatgtaaatttaattttatggtatcgttataaagtccaacaataatatcgctcgggctcataggggtgatagtatttgtacttacgcaactgctatcattaaaattatgctcatatgtcgccatttgtgtttgagtaagtgcaaaatccccctgaacaaccaagttgtgctgaacagataactcactataacatgccgcatagctcacaggcataaccatcatcattaatataaatagcattatgcgaatttccatagaaccacctgactattactggcaaatataatttctactttcatcaatctctttaccgaaggtgattgtgcaactaagtccttgttgcttatcaattgccacattaacgcttggcggtacttcattggtgcgaataaataactgacttccctggccgacaacgccaatattatgaccatggatatcattgacttcataaccaaacgttaaactttgcccatctgctcttaacgcttttataaaccatggcttgcgctgatcggtatcaaaattaaccagtacaaccgcgccgcgataaggggcggcaattttccggttgccacgtaattctgcttcgctatcgctttggctcacatccagcatcaggtgattttcccgataaggtgtcattccgtcgtatatcaccactccattacggtttgttgtgcgatatttttgcccattgacataagcatctttaattcctggcgcattcatcacagcaaacgtttcggaaagacggttcgccagattaacgccaccgctccaggcgacaatgcccccactaacactggctccagcctgtcgataagtactgctctgactataactgccattcactgtcgcaaccggcgcgttccaggtcaaattcgccccagctgtcgtttcatttccctgatgttgatgactcaggttgacaccataattgaactgatcccgactccctactgttccacttaatcccgtattattactggcaaacccctgatcatcaaacgtcgtactgttagacatatatatttgccgacgaggcgtgctaacgtcatcaccccaatcaaagggaatgcttataaaaatattaaaacgtttctcttcatgatgattctcgtcataagcctggcttgccgcgagggtatagcttatccgtcgcaggttgttggaataactcaactgataatccttactactgccgctacgcccccagtaatctcgccataacgtacttaaactcacagacccccaaccttctggcaaactctggctcatattggcggaaaagctatttttgcggccaaaatcgttctggtaataatcggcaatgtcatagacatcgttttcatcacggcgataattatctttattgtttgcccaaacgtgatcgttaaatgtccggtaatcacggctgctataacgccaggccgccagaccaaaacgcgtgctcgtttggctcacaaatttgttgtaggcaatttgataactttgcccgtcaaacacatcgccgttgtcttgtttactatggctcttagtggcatcgacggaaatggcaccaatgcgtgtattccagccagcccccaaagtaaacgcgtaataattattcgcgaccatgctgccaccatacagcgtcaataaattattaaaaccatactgataacccgcctggacaaaatcactttgtttgctcgccccttcaatatggctacgacccgccgctaaatcatatttgctcacgccgggttgcagcatatttggcaccgctgcataaggcaccagataggtggttacgctgccgtccgcctctttcacgctgacatcaagatctgctccaccaccggccaactgcaaatctgtaatcgcgaacgggccaggaggaacctctttctgataaaccacaaaaccattctgttcaatagttaccagcgcgttactctgagcaatcccctgcacccgtggcgtaaaattttgtttgctgttaggcaacatctgcatatcacgaaacaaccgcacacctctgaagcgaacagaatcaaaaatatcgctacttgtgtacatatcacccacgcgaagcgtgccgagaagttgggcaaatccacgttccagatacagggtattgcttttccacacccctggattgttatttgttttactgaaactggcatcagaatgcagttgccaccccagtaaatttaacccgctgttaaaacgtacatatgtactcttgttattaccgctcgctttatagtcgctgtaatactgactcagataataagaggtataaaacgcattaataccccgctcccagttttccggtggaacatagccactttccagttcttccacccaggcctgcgggacactgaaatcgagacgaaaaaccccgatatcccaggtatagctcccaccctgaacaagttgctcaaatgttaaacattgcttaccgctggcgaagttatcgctattaatgcctaaccgcttgataacttctctacttaaacatgtttcttgcgggttgtctttaacaataatctcatatttcccgcgccattgcttattgacataaatatcgatgtcatactgccccggtaagggttgattatcatcaagacgaatatttgcaacctgctggtctttcattccacctatcataaaatgggtatcaaaggtttcttcagctgcataagcttcaatgccgagcaataacgctacgattgcacttgcaagtggggtcattctcaacataggcagctcctgcaattaaattttgtcactaatatagttgccatggtcatcgataatggtcagatgccagttatttgcattattacttttgacattaacactctgactttctaagggggcaatcataatagtttcataattgactttgacattattagctttgacatcgctaatcgtcacccaattagcactgtcattttttatcaccaaaccattgccactgcgatttaccagcaattttttaaatgtcgctttatttaccggagcaatacccgctggccggtaaaacaacttaattctgttttgcatcgcaaacttcagtgcattcttaccttcttgctctggactatttggtggaatatccagaacattcagataaaaaatgctttctttattagtgggcagtttattcggcataattttgatttttacttgctgcccggaatttgcccctatttttgccactggtggcgttaacatgaaaggaacctgaattttttctggtggtaaactcgtatcgccatcatcaatccacgcctgcagcaggctagaacggtttccctggttcatcaactgcaccatcacttctttattttctgccgggtaaataatgcgcgtcccgtagataacaattccggcatgtgcaggaaggaccatagaaaaaatgagtaaagataataatcctttcattttaatgcctcttaaattaaaaggccgccatgggatagcggccatgtttattacctggagaaacttacaattttatttattaatcctgcgccacacgcataaccagagaagataacacatcaccactttgcacactgttatctgtcagtttcaggtattttgctttaaacggaatagcatattgaccttccgctgttttataactctcaatgttaaaaggtgcagaaacatccaggacatcgctgttatcacctaaatagagatagtaacccacggtatcgttgctactggctatcgccttatcgttaccggttattttatcgttggtaatcaagctgagttttacaccagcaacttctttcgggcagctaatttttaacatgctgctggttacaccgactgcatcatcataggtagaatatttagctttaccttcaaagacactggttggtacagtcggcatattaatacttacactatcaccacccgcttcgaatttacacggagattctgcaatattccccttaatagttaatgttccggtatcaacgtctgcagcaaatactccagcgctcataaaaaaagaagaaaagacagcggcagcaataatactacgtttcataatatgttccttaataaaatttatttttggttgttaagagtctgtatctcttggaaacaaatttctcacatcaaaaaagttgccgcaatgtaaacacattgttttattgatttaaaacaaattaaccattgcaatataaatacaaaaaatatttaagagtattaactatttatcgcatctatcaattaatgtagatttatgtaaatggtattgttgatatcaataaaaaagccgaaatcatttatataaatgatttcggctttctaaatgcaattaaaatcaggttgccaaattaatcgtagcgatttaacacgattcgacgtttgctatcgctacctgcaacaaccacttctgtcgttacacctttgacggggctagaaaacagatgacgggtgtcaacattatacgttaactgaccacaatgctgttgaggttgaccattaaccatagccatactgcatgttgggggactgatcctgccattaatcgctaatgtggcagtctcactagagaatgcgggagaagccaatccataggcaagaaaaataattccactcagccaatacttattcattgaacgttatccctgtagtaaaggttatgcctggatagaatgagtgcataacaaactatagctgtacatccactacacagccacgaaggatgataatgaagcattgcctgtatgatcaatcgactttgtagagtttcggacgaaggtccgcagaatattcgcagtattaaataagtgttcattaatgcggcaaaaactaatacaccgcatcaatgtaacatctctgcggtgtatgaagaataaccagaatggttaataggcgttagaccgcgcggaaggaaatctcgcctggaatgacttcaccctgccagtagagctgagctgcaacgcggtcagccagctggcggtagatagcggtaaattcgctctccggacggctgataaccgttggcgtacctttatcgagatcctcacgtaaggagatgtgtaacggcatctgccccagcagctgtgtatggtatttttcagccagtttctctgcaccaccggtaccgaaaatcggttcatggtgaccacagttactgcaaatatgcacactcatgttctcgacaataccgagcaccggaacctcgactttctcgaacatcacaatgccttttttcgcatcgatcagcgcgatgtcctgcggggtggtgaccacgactgcaccggttactggaatgttttgcgccagcgtcaattgaatgtcaccggtgcctggcggcatatcaagcaccagatagtcgagatccggccacaaggtttcctgcaacatctgcattaacgccttgctcgccatcggtccacgccacaccatcgcattgtcgtcagtgaccagataaccaatactattggttgccaggccatgagacataatcggtgccatatgggtaccgtccgggctagttggacgctgattttctgcgcccaacattgttgggatacttgggccgtagatatcggcgtccagaatgccgactttcgccccttctgccgccagcgccagtgccaggtttaccgccgtggagcttttacccacgccgcctttaccggaactcaccgcgataatgttcttcacaccgttaattcccggctgattcttcacgcgtttcagagtggctatgttatggctcagtttccagtcgatagctttcgccccggtgatgcgcagcagttcggcgctacattgctcttttaactcttcgaacgcgctatgccagacaaacggcataaccagttccacatgcaacgtgtcgtccatccaggcgacatggtgcaacgctttcagcgtggtgaggttatgcttcagggttgggtgctgaaaattggccagtgtcccggcgaccattgcgcgcaaggcttctggacttttggcctgggattgttcgttcatcccgactccttttttgtatagataaaccatcagctgatagtttacctgaagaatatagagaagtacttacttaacattttcccatttggtactatctaaccccttttcactattaagaagtaatgcctactatgactcaagtcgcgaagaaaattctggtgacgtgcgcactgccgtacgctaacggcagtatccacctcggccatatgctggagcacatccaggctgatgtctgggtccgttaccagcgaatgcgcggccacgaggtcaacttcatctgcgccgacgatgcccacggtacaccgatcatgctgaaagctcagcagcttggtatcaccccggagcagatgattggcgaaatgagtcaggagcatcagactgatttcgcaggctttaacatcagctatgacaactatcacagcacgcacagcgaagagaaccgccagttgagtgaacttatctactctcgcctgaaagaaaacggttttattaaaaaccgcaccatctctcagctgtacgatccggaaaaaggcatgttcctgccggaccgttttgtgaaaggcacctgcccgaaatgtaaatccccggatcaatacggcgataactgcgaagtctgcggcgcgacctacagcccgactgaactgatcgagccgaaaagcgtggtttctggcgctacgccggtaatgcgtgattctgaacacttcttctttgatctgccctctttcagcgaaatgttgcaggcatggacccgcagcggtgcgttgcaggagcaggtggcaaataaaatgcaggagtggtttgaatctggcctgcaacagtgggatatctcccgcgacgccccttacttcggttttgaaattccgaacgcgccgggcaaatatttctacgtctggctggacgcaccgattggctacatgggttctttcaagaatctgtgcgacaagcgcggcgacagcgtaagcttcgatgaatactggaagaaagactccaccgccgagctgtaccacttcatcggtaaagatattgtttacttccacagcctgttctggcctgccatgctggaaggcagcaacttccgcaagccgtccaacctgtttgttcatggctatgtgacggtgaacggcgcaaagatgtccaagtctcgcggcacctttattaaagccagcacctggctgaatcattttgacgcagacagcctgcgttactactacactgcgaaactctctagccgcattgatgatatcgatctcaacctggaagatttcgttcagcgtgtgaatgccgatatcgttaacaaagtggttaacctggcctcccgtaatgcgggctttatcaacaagcgttttgacggcgtgctggcaagcgaactggctgacccgcagttgtacaaaaccttcactgatgccgctgaagtgattggtgaagcgtgggaaagccgtgaatttggtaaagccgtgcgcgaaatcatggcgctggctgatctggctaaccgctatgtcgatgaacaggctccgtgggtggtggcgaaacaggaaggccgcgatgccgacctgcaggcaatttgcagtatgggcatcaacctgttccgcgtgctgatgacttacctgaagccggtactgccgaaactgaccgagcgtgcagaagcattcctcaatacggaactgacctgggatggtatccagcaaccgctgctgggccacaaagtgaatccgttcaaggcgctgtataaccgcatcgatatgaggcaggttgaagcactggtggaagcctctaaagaagaagtaaaagccgctgccgcgccggtaactggcccgctggcagatgatccgattcaggaaaccatcacctttgacgacttcgctaaagttgacctgcgcgtggcgctgattgaaaacgcagagtttgttgaaggttctgacaaactgctgcgcctgacgctggatctcggcggtgaaaaacgcaatgtcttctccggtattcgttctgcttacccggatccgcaggcactgattggtcgtcacaccattatggtggctaacctggcaccacgtaaaatgcgcttcggtatctctgaaggcatggtgatggctgccggtcctggcgggaaagatattttcctgctaagcccggatgccggtgctaaaccgggtcatcaggtgaaataatcccccttcaaggcgctgcatcgacagcgccttttctttataaattcctaaagttgttttcttgcgattttgtctctctctaacccgcataaatactggtagcatctgcattcaactggataaaattacagggatgcagaatgagacactttatctatcaggacgaaaaatcacataaattcagggcagttgagcaacagggaaacgagttgcatatcagttggggaaaagttggcaccaaagggcaaagccagataaaaagtttttcagatgctgcggcagcggcaaaagcggagcttaagctgattgcggagaaggtgaagaaggggtatgtggagcaagcgaaggataattctttgcaaccttcccaaacggtaacgggctctctcaaggtagcggacttatccaccattattcaggaacaaccctctttcgtagcagaaacccgtgcgcctgacaaaaatacagatgctgttttaccgtggctggcgaaagatattgctgtcgtttttccgcccgaagttgtacacaccacgttaagtcatcgccgctttcccggagttcctgttcagcaagcagacaaattgccccaattacgtcgcttagcctgtagtgtgtcgcaacgggataataaaacagccacatttgacttcagcgcctgttctttagaatggcaaaacaccgtcgcccaggcgatcagtcagatcgacggcctgaaaacaacacagttaccatcaccagtaatggctgtactcacggcacttgaaatgaaatgcacaagatataaagtgcgtgaggatgttatggatcagatcgtccaggaaggcggtctggaatatgctactgatgtaataatacaccttcaacagattgatattgaatgggattatgcgaataatgtcattattattctgccgtctggcattgcacctagctacttggagcaatattccagatttgaatgacgcctacgtaaacatttatcactgacggaagagtctctctggcaaaaatgtgcacaaaaacttattgccgcaattccacatattccagaatggcggcaaccattaattgctttgttattacccgaaaaaccagaaattgcacatgaaattgcccagcgtctactggggcaaaaaaaattaccctcgcttgagtggttaaaaatagtggcgactgatgagcacattcttgcctcattagaaaaatatcacgaaccatatgccatttttgatgattactattgtggtgcgatatggtcagccaccgtattacaggagcaaggtgttgcagccctgccccgatttgctccctatgccgcaagtgactactgcgccgatgtgttgcgtcatatcaatcatccgttcgcattgacactgcttatacgtgtagccgggcaaactaaacgctgtcacgatcggatgacgaaagccattgctgcgttcccacatgcagcaatggcggcactgacggaacttcttgggcaaaaagaagagaacagttggcgcattatgctaatgacaatgcttatctcacaaccagcactggcagaacaggtcattccctggctctcgacacccgcagttgccgtactgaaatcatgccagcaacaactgacacagccctcaaaccatgccagcgccgatctactgccagccgtagtagtctcccctccctggctttcgaaaaagaaaaaatcgccgattccggtgctggatttagcgccattaggcattgagccaatctgttatctgacagaagaaatcagtaatcaacttttggcgaaatatatctggtattcaaaacacatcacggttagccatgaagaaagtactaccaacctgttggcaaggatgggttttcaacgacggatcgctggtacatatattaaagctcccgaagcggtagttgaggcatggctaaatgaagattattcaaccttactaagtgaatttaaggtgtttcattcacctaccgggcattattggcagttggggattttgacaacattgccgctggagaaagcagtaaaagcatggaatgcccttaccctatctccacataccgataccgaatactccatgttacattttggactcaaagggttacctgggttagtaaactcacttgcacgctatccacaagaagccttgcccatcacgaattacttcgcagcgagtgagctggctcctgccgtcgcccgtgccttcaacaaactgaaaacgctacgcgaaaacgcccgtagctggctgttgaaatacccggaacatgcccttaccggcctgctgcctgcggcgctcggcaaagccggtgaagcacaggataacgcccgcgctgccttgcgtatgcttaccgaaaacggtcatcagccattactgcaagaaatcgcccgacgttataaccagccggaagtaaccgatgcggtgaacgctctgcttgcgctcgatcccttagataatcacccgacaaaaatccccactcttccggccttttatcagccatcgctctggacgcgcccggtattaaaagcaaatgcccaatcactgccagatagcgccctcctccacctcggtgaaatgctccgcttccctcaggaagaggctctgtatccgggattattgcaggtgaaagacgtctgttccgccgactcactggcgggatttgcctgggatctgtttaccgcctggcagaccgctggcgcgccgtcgaaagagagttgggcgttcactgcgttaggcgttctcggtaacgatgacaccgcccgcaaactgacgccattaatacgcgcctggcctggtgaatcccagcataaacgcgccaccgttgggttggatattctcgctgctatcggtagtgatatcgcccttatgcagcttaacggcatcgcccagaaactgaaattcaaagcattacaggagcgggcaaaagaaaaaattgccgacattgccgagagccgcgaactcacggtggcggagcttgaagatcgggttagcaccggatctcggtctggatgataacggttcgctgctgctggattttggcccacggcagttcaccgtcagctttgatgaaaccttaaaaccgtttgtgcgtgatgtttccggcagccgcctgaaagacctgcccaaaccgaacaaaagcgatgatgaaacgcgggcgaacgatgcggttaaccgctacaaattgctgaaaaaagatgcgcgtaccatcgccgcccagcaggtagcaaggctggaatccgccatgtgcctgcgccgccgctggtcgctggaaaacttccagctcttcctggttgagcatccgctggttcgtcacttaacccgccgtctgatttggggcgtttatagcgccgaaaaccagctactggcttgctttcgcgtagcagaagataacagctccagcaccgctgacgatgatcttttcaccctgccggaaggcgatatctctatcggcactcctcacgttctggaaatatcaccaacggatgctgccgcctttggtcagctttttgccgactacgaactgctaccaccgttccgccagctcgaccgtaacagctacgccctgacagaagccgagcgcaatgccagtgaactgacccgctgggcaggcagaaaatgcccgagtggtcgggtcatggggctggcgaataaaggctggataaagggcgaaccacaggatggaggctggatcggatggatgatcaaacctttgggtcgctggtcgttaatcatggaaatcgatgaaggctttgcggtaggcatgtcgccagccgaactcagcgctgagcagctcttaagcaagctgtggctatgggaaggcaaagcagaaagatatggctgggggagtaattcaacacaggaagcgcagttctccgtaatcgatgccatcaccgccagcgagctaattaacgatattgaagccctgtttgaataaggaaagagcatggacaaggaattaccgtggctggcggataacgcccaactggaactgaaatataaaaaaggcaaaacgccgctcagtcatcgtcgctggccgggcgaaccagtgtccgttatcactggaagtctcatccagacattgggtgatgaattgctacaaaaagctgagaagaaaaaaaacattgtctggcgttatgagaattttagtctggagtggcagtccgccatcacgcaggccatcaacttgatcggcgaacacaaacccagtatcccggcccggacaatggcggcgctagcctgtatcgcgcaaaatgacagccaacagttgctcgacgaaatcgtccaacaagaggggctggaatatgcgactgaggtggtgattgcacgccagtttattgcgcggtgttatgagagtgatcctctggtagtgacattgcagtatcaggacgaggattatggctatggttatcgcagtgaaacctataacgaattcgatctccgactgcgtaagcatctctctctggcagaggaaagctgctggcagcgttgcgccgacaaactcattgccgcactaccaggaataaacaaagttcgccgcccttttattgcgctgatcctcccggaaaaaccagaaatagccaatgagttggtaggccttgaatgcccgcgaactcattttcattctaaggagtggttaaaagttgttgctaatgaccccacagcggtgagaaaactcgaacactactggagccaggatatatttagcgatcgagaagccagctacatgagccatgaaaaccacttcggctacgcggcctgcgccgcccttttgcgcgaacaaggactggcagccattccgcgcctcgcgatgtatgcccataaagaagattgcggcagtctgctggtacaaattaaccatccgcaagtcatccgcaccttgctactggtggctgataaaaacaaacccagcctgcaacgtgtagctaaataccataaaaacttcccccatgcgacgctcgccgcactggcagaactgctggcgttaacagaaccaccagcccgccctggttatccaatcatcgaagacaaaaagctgcctgcacagcaaaaagcacgcgatgaatactggcgtacgctgttacaaacgctgatggcaagccagccacaactggcagcagaagtgatgccgtggttaagtactcaaccccagagtgtgctgaagagttatttaagcgcaccgcccaaaccggttattgatggcaccgataacagcaatctgccagaaatcctcgttagtccaccgtggcgtagtaagaaaaaaatgacagctccacgtcttgatttggcaccgctcgaattaactccgcaagtttactggcaaccaggcgaacaagagaggcttgccgccactgagcctgcccgttatttcagcacggaatctcttgcgcaacgcatggaacaaaaaagtggacgagttgtattacaggaactgggttttggggatgatgtatggctgtttctgaattatatactccccggaaaactggatgctgcacgcaatagtctctttgttcagtggcattactaccaggggcgggttgaagagatcctgaatggctggaactccccggaagcacaattagcagaacaggcgctccgcagcggtcacatagaagcgttaattaacatatgggaaaatgacaactacagtcattatcgtccggaaaagagtgtctggaacctgtatttattggcacagttgccgcgtgagatggctttgaccttctggctgcgtatcaatgagaaaaagcatctgttcgcgggtgaggactattttctcagtatcctcggattggatgcgctaccaggtctgctgttggcttttagtcatcgtccaaaagaaacatttccgttaattttaaattttggcgcaacagaactggcgctgcctgttgcccacgtctggcgacgtttcgcggcgcagcgtgatctggctcgccagtggattttacaatggccggaacatacggctagtgcacttatccctcttgtctttaccaaacccagcgataatagcgaagccgcattacttgccctgcgtttactgtacgaacagggacatggcgaattgctacaaaccgtggcaaaccgctggcagcgtacagatgtatggtctgccctggagcagttgcttaaacagggtccaatggacatttacccggcacgcattccaaaagcccctgatttctggcatccgcaaatgtggtccaggccgcgccttatcactaataatcaaactgttaccaatgacgctctggaaattatcggcgaaatgctgcgctttacccaggggggacgtttttatagcgggctggaacaactgaaaacgttctgccagccacaaacgctggcagcttttgcctgggatctcttcactgcgtggcaacaagctggtgcccccgcaaaagacaactgggcatttctggcgttaagtctctttggtgacgaaagcacggcacgggatctgacgacacagatcctcgcctggccacaagaaggcaaatctgcccgtgctgtcagcggcctgaacatccttaccctgatgaataatgatatggcgctgatacagctgcatcatataagccaacgggctaaatcccgccccttacgtgataacgcggcggaatttcttcaggtggtcgcagaaaatcgcgggctaagccaggaagagctagcggacagattagtcccaaccctgggccttgatgatccgcaggcgttgagttttgattttggtccccggcagtttaccgttcgcttcgatgaaaatctcaacccggttatctttgatcagcaaaacgttcgccagaaaagcgttccccgtttgcgcgccgatgacgatcaactgaaagcgcccgaggcactggcccgactaaaagggctaaaaaaagatgctactcaggtgagcaaaaacctgctcccgcgtcttgaaacggccctacgtaccacccgacgctggagcctggcagattttcattctctgtttgttaatcatccctttacccgtctggttacccagcgattaatatggggggtttatccggcaaatgaaccgcgttgtttactcaaagcctttcgtgtggccgcagagggggagttctgcaatgcgcaagatgagccaattgacctgcctgcggacgctctgattggcattgcccacccgttagaaatgacagcagaaatgcgcagtgaatttgcacagctttttgccgattacgaaattatgccgccttttcgccagttgagccgccgcacggtgctgctcacacctgacgagagtaccagtaacagcctgactcgctgggaaggtaaatccgctaccgttgggcaacttatgggaatgcgatacaaaggctgggagagtggctatgaggacgcatttgtctataacctgggtgagtaccggctggtccttaagtttagtcccggttttaaccactacaatgttgatagcaaagcgctaatgagcttccgttctcttcgagtgtaccgtgacaataaatccgtcacttttgccgaacttgatgtgtttgatttgagtgaggcgttaagcgcacctgacgtcattttccattaaaacacagcgggcagtgatgcaactgcccgttatcaacacgacttaccagcggggaaagcgatgatcgtgcaaaaagagctggttgctatttacgattatgaggtccctgtacctgaagatccgttttccttcagacttgagatccataaatgctctgaattatttacaggttccgtctatcgactggagcgattccggctacgtccaacatttcatcaacgtgatcgagaagatgctgacccgctaataaatgatgcgttgatttatataagagatgagtgtattgatgagcggaaattacgaggtgaaagtcctgaaactgtaatagcaatttttaatcgtgaactacagaatatattcaaccaagaaatagaataatatactctaaataattcaaattggtccgatccggcgcaacgtcccaatggcctggattataaatctcattatcttaattgcaacggggtccagccgtggttataattcgttcgttggaacacgatgttgcacaggctgtggtgttaggcctgaaaatagtaaataaaagaacctgcctcaccagcaggtttttttatttactgtgatctgctttccagatatttttcgctcaaacaactaatgcgccaaacatttattgcgcgtaaaatatcgtttatttcattaatacatttcagggatgaatatatgagtccgcagaataatcatctgcagcgtccgcctgctgctgtgttatacgccgatgaactggcaaaattaaaacaaaatgataacgcaccttgcccgcccggttggcagttaagtttgcctgcggcccgtgcttttatccttggcgacgaagcgcaaaatatcagccgtaaagtggtgattagcccctccgctgtcgaacgtatgttagtcactcttgctaccggccgcggtttgatgttggtgggggaaccgggtaccgcaaaatctcttctttctgaattactggcaaccgctattagcggcgatgccgggttaaccatccagggcggggcatctaccaccgaagatcaaatcaagtatggctggaactacgccctgcttatcaatcatggtccgagtacggaagcgctggtccctgccccgctttatcagggaatgcgcgacggcaaaatcgtccgtttcgaagagataacgcgtacaccgctggaagtgcaggactgtctgttaggtatgctttctgacagggtgatgacggggccggaactcactggtgaagccagtcagctctatgcgcgagaaggctttaatattattgccactgccaatacccgcgatcgcggcgtcaatgaaatgagtgctgcgctaaagcgtcgcttcgattttgaaacggtttttccgattatggatttcgcccaggagttggaactggtcgccagtgctagcgcgcgtttgctggcccatagcggtattccgcataaagtgcctgacgcggtactggaattactggtccgcaccttccgcgatctgcgtgccaacggcgaaaagaaaacgagtatggatacactgacagcgattatgtccaccgctgaagccgtgaacgtggcccatgctgtgggcgtccgcgcctggtttttagcgaatcgcgcgggggagcctgccgacctggtggaatgtattgccggaaccatcgtcaaagataacgaagaagatcgcgcgcgtctgcgccgttacttcgaacagcgtgtcgccacacataaagaagctcactggcaggcttattatcaagcccgccaccgcctgccgtgaggaaagatgcatgagcgagccgttaattgtcggcatccggcatcatagtccggcctgcgcccggctggtgaaaagcttaatcgaaagccagcggccacgatacgtgttgattgaaggcccggctgattttaatgaccgggtagacgaactgtttttagcccaccagcttccggtagctatttacagttattgccagtatcaggacggtgcagcccccgggcgtggtgcctggacgccatttgctgaatttagcccggagtggcaggcgctacaagccgcacgtcgcattcaggcacaaacttacttcatcgatttgccttgctgggcgcagagtgaagaagaggacgatagccctgatacgcaagatgaaagccaggccttactgctgcgtgccacccgcatggataacagcgataccctgtgggatcacttgttcgaagatgaaagccagcaaactgcattaccctctgcgctggcgcactattttgcccaactgcggggcgacgcctccggcgatgcgctcaatcgtcagcgcgaagcctttatggcccgctggattggatgggcgatgcagcaaaataatggcgacgtgttagttgtctgcggtggctggcacgctccggcactggcaaagatgtggcgcgaatgccctcagaaaattaacaagccagaattgcccagcctggcagatgccgttacaggttgttatctcacaccctacagtgaaaagcgccttgatgtgctggcaggataccttagtggaatgcctgccccggtatggcaaaactggtgctggcagtggggcttgcagaaggccggtgaacaactgctaaaaactatccttacccgtttgcgccagcacaaattgcccgcttctaccgcggatatggctgccgctcatctgcatgcgatggcgctggcacagttgcgcggtcatacactaccgttacgcactgactggctggatgccatagcaggcagcctgattaaagaagccctgaacgcgccgttgccgtggagctatcgcggcgttattcatcccgataccgatccgattctgctaacgttgatagacacattagcgggtgacggattcggtaaacttgccccttctacgccacaaccgcctctgccaaaagatgtcacctgcgaactggaacgtaccgcaatctcccttccggcggagcttaccttaaatcgctttacccccgatgggctggcgcaaagtcaggtgttacatcggctggcaatactggagatccctgggattgtacgccagcagggaagtacactgacacttgcaggcaacggtgaagaacgctggaaattaacccgcccgcttagccagcatgcggcattgattgaggccgcctgttttggtgccacactccaggaagccgcacgcaataaattagaagccgatatgctggacgcgggcggaatcggcagtatcaccacatgtcttagccaggcggcgttagcgggtctggcgtccttcagtcaacaattactggagcaactcacactattaatcgcccaggaaaatcaatttgccgaaatgggccaggcgctggaagtgctttatgccttatggcggctggatgaaattagcggtatgcaaggcgcgcagatattacaaacgacgttatgcgcgactatcgatcgcacgctgtggctgtgtgaatctaacggcagaccggatgaaaaggagtttcacgctcacctgcatagctggcaagcgctttgccatattctgcgcgatctacatagcggcgttaatttacccggcgtttctctttctgcggcggtagccttactggagcgacgcagtcaggcaattcatgccccggcgctggatcgcggcgcggctcttggcgcactaatgcgtctggaacatcccaacgccagtgccgaagcggcgctgacgatgctggcgcagttatccccggcacaatctggtgaggcgctgcacggtttgctggcgctggcccgccatcaactggcctgtcagccggcatttatcgccggtttcagcagtcatttaaatcaactgagtgaagccgattttattaacgccctgcccgatttacgcgcggcgatggcctggctaccaccacgagaacgcgggacgctggcgcatcaggtgcttgagcattatcaactggcgcaacttcccgttagcgcgctgcaaatgccgttgcattgtccaccacaggccattgcacatcatcaacaactcgaacagcaggcactggcaagcctgcaaaactggggagttttccatgtctgaactgaacgatcttctgaccacccgtgagctacaacgctggcgattaattcttggcgaagcggcagaaacgacgctttgtgggctggatgacaacgcccggcagatagaccacgcgctggagtggctgtatgggcgcgatcctgaacggctccagcgtggtgaacgttccggtggattaggtggcagtaatctcaccacccctgagtggatcaacagtattcacacgctgtttccgcagcaggtgattgagcggctggaaagcgatgccgtgctgcgctacggcattgaagatgtggtgacgaatctcgacgtgctggaacgtatgcagccttctgaaagcctgctacgcgctgttttgcacaccaaacatctgatgaaccccgaagtactggctgccgcccgccggatagtgtgccaggttgttgaagaaattatggctcgactggcaaaggaagttcgtcaggctttttctggtgtccgcgatcgccgtcgccgtagttttattccactggcgcgaaactttgatttcaaaagtactctgcgcgccaacctgcaacactggcacccgcaacacggcaagttgtatatcgaatccccccgctttaacagccgcattaaacgccaaagcgaacaatggcaactggtcttactggttgatcaaagcggaagcatggtcgatagcgtgatccactctgcggtgatggcggcctgtttgtggcagttacccggcattcgtacccatctggtggcgtttgacacaagcgtcgttgatctcacggcagacgttgccgatccggtagagttattaatgaaagtacagttgggcggcgggaccaatatcgccagtgccgtggagtatggtcggcaacttattgaacaaccagcgaaaagcgtcattatcctcgtgagcgatttttacgaagggggtagtagtagtttactgacgcatcaggtgaaaaagtgtgtccagagcggcatcaaagtgctgggactggcagcgctcgatagcaccgcaacaccttgctatgaccgcgatacggcccaggcgctggttaatgtcggcgcacaaatagccgccatgacgccgggcgagctggcaagttggcttgcggagaatcttcagagttgacataacttgcggagaatcttcagtcatgaatagtctacgtccggaattattagaactgacaccgcaggccctgacggcgttaagcaatgccggttttgttaagcgcagtcttaaggaactggaaaatggcaacgtcccggagatcagccatgagaacgacgctttaatcgccaccttcagtgacggtgtccgtacccagctggcgaacggccaggcactgaaagaggctcagtgcagttgcggggccaacggtatgtgccgtcatcgcgtgatgctggtgttaagttatcaacgactttgtgccaccactcagtctacggaaaaagaagaagagtgggatccggcaatctggctggaagaactggctacccttcccgatgctacccgcaaacgcgcacaggcgctggtcgctaaaggcatcaccattgagttgttctgtgcgccgggtgaaattccctctgcccgcttaccgatgagcgatgtgcgtttttattcccgcagcagtattcgtttcgcccgttgtgattgtattgaaggcacactttgcgaacatgtcgtactggcggtacaggccttcgtcgaggccaaagcgcagcaagcagaatttaaccatttaatctggcagatgcgcagcgaacacgtcacaagttctgacgatccgtttgccagcgaagaaggcaacgcgtgtcgtcaatatgttcagcaattaagccagacattatggcttggcggcatcagccagccgctcatccattacgaggcagcattcaaccgcgcattgcaggcggcagagacctgcaactggcgctgggtgagtgaaagcctacggcaactgcgcgccagcgttgatgccttccacgcccgcgccagccactataatgccggagaatgcttacatcagcttgcggcattaaacagtcgattaaattgcgcacaagagatggcccggcgcgacagtattggtgaagttcctcctgtgccgtggcgcacggtcgttggctctggcattgccggagaagcaaagcttgatcatctgcggctggtgtctttaggtatgcgttgctggcaggatattgagcattatggtttacgcatctggtttaccgatcccgacaccggcagtattttgcaccttagccgcagttggccgcgaagtgaacaggaaaacagtccggcagctacgcgtcggctgtttagttttcaggctggcgcactggcgggcgggcaaattgttagtcaagcagcaaaacgcagtgccgatggcgagctgctgttagctacccgcaaccgcttaagcagcgttgtgccgctgagccctgatgcctggcaaatgttgagcgcgccgttacgccagccgggcattgtggctttgcgggaatatttacgccagcgtccccccgcctgcatacggcctcttaatcaggtcgataacttatttattctgccggtcgctgagtgtattagcctcggttgggacagcagccgccagacgctggatgcgcaggtcattagcggcgaaggggaagataatgtgctgacgttaagtttaccagccagtgccagcgcaccttatgccgttgaacgcatggcggcgcttttgcaacaaacagacgaccccgtgtgtctggtttctggctttgtcagttttgttgaagggcaattgacactggaaccacgggtgatgatgacaaaaacccgtgcctgggcgctggacgcagaaactacgcctgtggcaccgctaccttctgccagcgttttgcctgtgccgtctactgctcatcagttgctgatacgctgccaggcgttacttattcaactgctccataacggctggcgctatcaggaacagagtgctattggtcaggcataattgctggcgaatgacctcaccgcggtgggtttttatcggctggcacatgtgttgggacaatttcgtaatacagaaagcgaggcacgggtagaagcaatgaataacggtgttttgctttgcgaacaattattccccatgcttcagcaacaaggatgaaatagtgctttttactaagagttctactccagttccggactgctcacgccacggtattaggcatatcctatatagcccctggtgagagtcaccagttccttgattaaataaaatggagttttacatgaaggctttcaataagctgttttccctcgttgttgcatctgttctggttttctctcttgctggctgcggtgacaaagaagaaagcaagaaattcagcgccaatctgaacggcactgaaattgccattacctatgtctacaaaggtgacaaggtgcttaagcaatcttctgaaaccaaaattcaatttgcctccattggtgcaaccaccaaagaagatgctgccaagacacttgagccgttaagcgccaaatacaaaaacatcgcgggtgttgaagaaaaattaacctataccgatacctacgcgcaggaaaacgtgactatcgatatggaaaaagtggattttaaagccctgcagggtattagtggaatcaacgtttctgctgaagatgccaaaaaaggtatcactatggcgcaaatggaactggtgatgaaagccgctggttttaaagaagtgaaataatcggttggcggtcatgctctaaacatgaccgccaattttttagccttttttcacatgctggcgcgctgccagtccacgcagaaaataacgtaaaaattgatcgccgcattcgcggaagtttttatgatccggtgcgcgcatcatcgctgtaatttccggcatgctaacgcggaactgctgttcggtgaggatagccagaatgtcatcggttttcaggctaaacgcgatgcgtaattttttcagcacgatgttgttattaatgcgacgttccggctccagtgccggagcagactcatccttgccgcgtttttcataaatcaggccattgaggaaactgctcaaaacaatgtccggacaacgctgaaaaccctcttcgtcttctttacgtagccagacggcgatctgttccgcggtggcttcgacattacccagcgccagaatacgcaccaggtcattattattggctttcaaaatgtagcgcacgctgcgcagaatatcgttacttagcatgaggccttcaggtgttgatgaggcaaaaagccattttagcagtcttttacaggccaatcgcctcttttaagcttttcagataacggcggctgaccggcacggttaagccattacgcaaaatcaactcggcctggccgttatcttccagacgaatctcctgtaaatgcgcgaggttaaccagatactgacgatggcagcgcagtagtggtgtacgactttccagggtacgtaatgtcaattcggtaaagccctctttcccttcgtggctggtaacgtagacaccgctcatccgactgctgacaaatgccacatctttcatttgcagcaaataaatccgactatgccccgtacaagggataaatttcagcgcctgttgattttccggtaacaggctaacatcctgcttgctgcgctcctgacgcaatcgcgccagcgttttctccagtcgcgcttcatcaattggcttcagcagataatcaaaggcatgttcttcaaaggctttaattgcgtattcgtcaaacgcagtgagaaaaacaatatacgggcgatgttccgggtcaagcatccccaccatttccagaccactgatgcgcggcatctggatatcgagaaacagcacatccgggcgcagtttatgcaccgcgccgatcccttccacggcgttactacactctccaacgatttcaatatcgctctgctcctgcaaaaatacacgcaggttctcccgtgctaacggttcatcatcgacaattaagactttaatcatgcctcgtccctccatggtagtcgtaacgttattcgggtgtaactatcaggctcacaggcgacgcttattccatagtcatcgccaaaccgttcacgtaaacgcttatccaccagattcatccccagcccactggcattggttaccggttgatacaaaccggcattgtcttcgatctccagcatcaaatgttgcccctcacgtcgggcgctgattgccactcgccctgtatccagcagttgacttgtcccatgtttaatggcgttttccactatcggttgcagggtaaacgcgggcaattgctgctgggataattcttgcggaatagcaatgttgacctgcaaccggctctggaagcgcgccttttcaatttgcagataagcattcacatgttcaatttcgtcggcgagagtaacaaactcgctaggccgctttaagtttttgcggaaaaaagtggaaagatactgcaccagctggctggcctgttcgctgtcgcggcggatcaccgctttaatggtgttaagcgcattaaacaaaaaatggggattcacctgggcgtgaagcagtttgatctcactctgggtgagcatcgctttttgccgctcatattgcccggcaaggatctgcgcgctaagcaattgcgcaatcccctcacccaacgtgcggttgatgctactgaataaacggtttttggcttcatacaatttgatggtgcccatcacccgctgattttcaccacgcaacggaattaccagcgtgctccccagtttgcattgcggatgcaaagagcaacggtaaggtacttcgttgccatcagcgtagaccacttcaccggtttcaatcgcttttaaagtataagtactagaaatcggtttgccgggtaaatggtggtcgtcaccaattccggtaaaggccagcaatttctctcgatcggtaatcgcgactgcaccaatatccagttcctgatacagcacctgagccactttcatgctgttcacttcgttaaacccctggcgcaaaatgccttccgtgctggctgccactttcagcgcagtggcagaaaaagcgctagtgtatttttcaaacatcgcgcgtttatcgagcaatatacgcataaacagcgccgcgccgacggtattggtgaccatcattggcgcagcaatattactcaccagacgcaccgcatcttcataaggtcgggcgatcgcaaggatgatcagcatttgcaccatttcagcgacgaacgtgacggcaccggcggtaatggggttaaagactttatcagtgcgcccgcggcggatcaggatgctgtgtaccaggccaccgagtaatccttcaacgatggtgctgatcatgcaacttaacgcggtcatgccccccatgctatatcgatgtaagccgccggtcagcccaaccagcccaccgacgaccggaccgccgagtaagccgcccattaccgcgcctatcgcacgggtattggcaatagaatcgtcaatgtgcaacccaaaccaggtgcccatgatgcagaagatggaaaagacgatgtagcagagaaatttatgcggcagacgaaccgtgacctgcattaacggtatgaataatggcgttttactcattaaccatgcaatgactaaaaaaacgcacatctgctgaagcagcagcaacaccagattaaaatcgtacatacccgcaaaccacacttccctttaaaacgcgtaacatacattgcctgcgtttaactttctttgaactcttgcagaaaaatgagaattcgtgagtacgatcactcaaaatcgcctggcaaaaataaaatcaccctatagatgcacaaaaaacgggcaaaactacctggttcgcaaaactgcgtctaaagttaaaccgggacctcgcgagcaagggtgagacgatggcgctttacacaattggtgaagtggcgttgctttgtgatattaatcctgtcacgttacgcgcgtggcagaggcgttacggattgctgaaaccgcaacggacagacggcggtcatcggctgttcaacgatgccgatattgaccggatccgcgagatcaaacgctggatcgacaacggcgtgcaggtcagcaaagttaaaatgctgctcagtaatgaaaatgttgatgtgcagaacggctggcgcgatcagcaagaaacattactgacttacctgcaaagcggcaatctacatagcctgcgaacgtggatcaaagagcgcggtcaggattaccccgcccagacactcaccacacatctgtttattcctctgcgccgacggcttcagtgccaacaaccgactctccaggcgctgctggcgatcctcgacggcgtactgatcaactacatcgccatttgtctggctagcgcacgtaaaaaacagggtaaagatgcgctggtggttggctggaatattcaggataccacccgtctgtggctggagggctggattgccagtcaacaaggatggcgcattgatgtcctcgcccacagcctcaatcaactacgccctgaactattcgaaggccgtacattgctggtgtggtgcggtgaaaatcgaacctccgcccaacagcagcaactcaccagttggcaagaacaaggccatgatattttcccactcggcatttaatgattcgttaacaaatgcgctttactgtacaatcctttcgttaacataaggagtgcattatgcgcatagctaaaattggggtcatcgccctgttcctgtttatggcgttaggcggaattggtggcgtcatgctcgcaggttatacctttattttgcgtgctggctaagcgcctgcaccagcctttcaaacaggcggtctgcgatgatcgccgccagtgccaccagtaacgccccctggatcacatacgcggtattaaatccgctaagcccgatgatgatgggcgtacccagcgtgctggcccctaccgtactggcgatcgtcgccgtaccaatgttgataatcacgctagttcgcacgcccgccagaatcaccggagccgccagcggtagctcgaccttacgcactcgctgaccacgactcattcccatacctttcgcaacttctgtcacgctggcatcaatcgctcccagcccggcaagtgtcgcctgcaggacgggcagcacaccgtaaaggatcaaggcgataatcgctggttgcagaccaaagccgatcaccggaacggcgatcgccagcactgcgacgggcggaaaagtctgtccaacggcggcaatagtttccaccagtgggcgaaattccgcgccccacgggcgagtgacagcaattccggcaccagtgccaatgatcaccgcaaacaaactgctaattcccaccagccagaaatgagccagtgccagagctgcaaaactttcttgctgataaacgggtcgtggcagttgtgggaacaaggcagcaaacagcggctggctgtaaggcagccagaaaatcagcgccacaaacagagcaatgagccagaacagcggatcgcgcaacatcttcatacgcttacgcctccaccagcagatcctgaaaatgcagcgtgccgcaaggctggccctgcatgttcaccaccggcagcacctcgcatccccgcgcaacaaacagagagagcgcatcgcgtagcgtcatctcttctgccagtgcctcaccatctgctcgttcttcgcgacgcacgtaatccgccacactacgtaagctaagcaggcgcacacccagttcactacgtccaaaaaactggcggacaaaatcattcgccggacgagtcagcatcgtcagcggattgccctgctgcactacttcaccgtgatccatcaataccagatgttctgccagccgtagcgcctcatcaatatcatgagtgaccagcacaatggtacgccccagcaaacggtgaatgcgcgtcatctcttgttgcaacgcgccgcgcgttaccgggtccagtgcgccaaaaggttcatccattagtaagacttgcggatcggcagccagtgcacgcgccactcccacacgttgctgctgaccaccggaaagctgatgcggataacgctcacgcaaattactctccagccccagtagcgccattaattcgtcgatacgatcgtcaatccgcgcccggctccatttttgtaattgcggcacggtagcgatgttttgcgccacgctccagtgggggaacaggccaatagattgaatggcatagcccatccggcggcgcaactccagtactggcaggctgcgaatttcttctccggcaaagcggatctctccgctgtcatgctccaccaggcggttaatcattttcagggtggtggatttgccggagccagatgtgccaatcagcacgctaaaactcccttcctgaaaattgagattgagatcgttaacggctttttgtgcgccgaacagtttgctgacatggctaaattcaatcattacgtttcaccttcagcagtgcgataagcaaatcgaacagcgcgtcggtaagcaccgccagaacaattaccgggatcacccccagcaacactaaatcaatggcgctgcttagcagcccctggaaaaccagcgcaccaaaaccgcctgcgccgattaacgccgcaatcaccgccatacctacagtttgcaccatcaccacccgcaggctgcgcagaaataccggtaacgccagcggtaactgaacatgcaggaaacgctgcgccccgctcatccccatcgctctggcgctttccagcacatcgcgcgggatctggttcaaaccgactaccacgccgcgcaccagcggcagcaaggcatagagcaccagcgcaatcagtgcgggtgtcattccggttcctgctatgccgagcgtccccagccacggaaaggccgtaaccagcgcggcaagcggcgcaatcaacaggccaaagagcgccacgctaggcacggtctgaatcacattgagcagagaaaaaattgccccctgccgagcagtggaaaagtagcaccagatgcccaacggcacaccaatcactaacgcaggcagcaccgcaccaaacagcaacgtcagatgttgtgccagcgcgtcgtcaaacacatcctgacggttggcgtattctttcattagactgagatcgttaagcgtgccggagtacagcaaccacagcggaataatggcaatctgcatatgcaacaaccagcgccacagcggatgcgtggagattcggcggatggcatcgctacaggccagcaatgccagcgccgcagccagccagaaaccactgccgaggctggtacgcgccagcgcactgccattttgcgccagttgggtcgccgcctttccagctccccacaccagcaatacgaagacgaattgcgccagaatgagtgcacaaatgctgccttttttaccgggaataaaacaggccgtcagccaggcgcaaccaacgcccaccagcatccagatcgtttgcggccacagctgccagagatgacgcccctcaccgctaactaaacgattaggcgcgtaactgataaacggcagcgccgctgcgattgccgtcagcaacagcagcagcgccagaacaggattaatacggaaataagtcacgggaaattacttcgtccaccctttttgtttcaggtagtcggcagccacttttttggcatccagtccttccacagcaatgctggcattcagttgctgcaatgtttttgcatcgaggctggcgaagactggctgtagccactgtgccatttgcggatactccctcaacacgctctcacgcaccactggtgcaggcgcgtagataggttgcacaccttgcggatcgcttaaggtttgcagccccagcgccgctaccgggccgtcagtgccgtaagccattgcagcattaacgccagaggtttgctgggcagcggctttgatcgtcaccgccgtgtcgccaccagccagactcagcaactgatcctgaccgagcttaaagccataggctttttcaaacgcgggtaacgcatcggcgcgttcgataaactctgcgctggctgccagtttgaaggtgccgccctcttgcagataacgactcaggtcggcaaggctagtgagtttatttttctctgccacatcctgacgcacggcgatagtccaggtgttatttgcaggcgcgggcgtcagccagattaacttgttgtgctcgctatcgagctttttgactttctcgtaaccttgctgcgcgtttttccacgctgcatcgttttcatctttaaagaagaaagcgccattgccggtatattccggatagatatccagttcaccggaagtaatcgccccgcgcaccacaggagtcgttccgagttgcactttattcaccgtcggtacgccgtggctttccagcacctgcaaaatgatattgccgagtagcgcaccttcggtatcgattttactaccgactttaacgggggaagccgcctgtagcggcaggctcacggctgccaacataaccagactacctgcccagagctttaagagtggcatgatgctttcctcattcttttactgttgttttcagcgaattaagagaaaagcatagttgataatggcggggttagcttgagcggaaggattcagttgcagaatcagataaatacttaagaggcatattcggtccggcgtttcctgccggatgcggcgcgagcgccttatccggcctacaaagggcgcaaacgtcgcgcccttactaaagcattacagcaactcaaactcgcctttcttaacgcgtgcggaatcagtgccgataaagacattgaacttgccaggctcggcgtcatatttcatctgttgattccagaacttcagcgcctcaatatcgatcgggaagctgacagtctgagtttcgcccggtttcagggtgattttctcaaagcctttcagctgtttcacagggcgactcatggaagccgtcacatcctgcaagtacatctgcactaccgtggcaccctcgcgcttaccggtgttcgtcacctgcacgctggcagtcactttgccgtcacgcttcatggtcggcgcagaaagtttcacatcagagacggtgaaagtggtgtagctcagcccatagccgaacggatacaacgccccgttagcttcatcaaaataacggctagtgtatttgttcggcttgtcggcattatacgggcgaccggtattcagatggctgtagtacaccgggatctgcccgacagaacgcgggaaggacattggcagcttgccggacgggttgtaatcgccaaacaatacatcggcaattgcattaccgccttcagtccccgcaaaccaggtttccagaatcgcatcagcctgctgatcttctttcaccagcgccagcggacgcccgttcatcagcaccagcaccagcggtttaccggtggctttcagcgccgcaatcaagtcacgttggctttgcggaatagtgatatcggtccggctggaggcttcgtgcgccatcccctgtgcttcaccgactacagccaccaccacatcagattgtttcgccgtctgcaccgcttcatcaatcatctcttgcgggctacgcggatcgactttgaccgcttcttcatactgattcaggaaatcgataatgcctttgtcactggtaacgttcgcccctttggcatacagcactttaccgttttcaccgacggcatttttaatcccggtcagtacggtcacggattgatcggcaacaccggctgcggaccagctgcccatcacgtcacgtttactgtccgccagtggcccaaccaccgcaatggtggcgctttttttcagcggtaacgtttcgagacggtttttcagcaacaccaagctttcgcgcgccacttcacgcgcttctttacggtgcaggcggctttcggcattggtatccaccgggtcagactctttcggccccaaatggctgtatgggtcgttaaacaaccccatatcatatttaacgttcagtacatggcgggcagcatcgtccagctctgccatcgtcactttgccggatttaatcaacccaggcagatacttgctgtagtactcgtcgctcatgctcatgttgattccggatttcagcgccacgcgcaccgcatcttccgggtctgccgccgtgccatgtttaatcagctctttgattgcaccgtgatcggaaacggtgatgcctttaaagccccactggtcgcgcagaacatctttcagcagccaggaatcggaggtggctggcgtgccgttcaggctgttcagcgccaccatcaccgcgccgctgcctgcgtccagccccgctttgtacggcggcatataatcattaaacaggcgctgcggactcatatcgacggtgttgtactctttaccgccttctaccgcgccgtatgcggcaaagtgtttgacgctggtcatcacgctgtagcgatctgccgggcttttaccctgcatcgcttccaccatggttttacccattgtactggtgagatacgtatcttcgccaaaaccttcggaagcacgtccccagcgcggatcgcggctgacatcgaccatcggtgcccaggtcatattcaggccatcatctgccgcttcataagcagagacacgtccgaccgttttcactgcatcgaggttaaaagagctggccagaccgaggctaatcgggaacaccgtgcgctgaccgtgcagcacgtcgtaagcaaagaaaagaggaattttcaggcggcttaattccatcacctgatcctgcatggcgcggatatcctgacgggttacggtgttgaaaatcgccccaacctgaccgtctttgatcatctcgcggatcgcctctttcgggttatccgggccgacgctgattaagcgcagctgaccaattttctcatcaactgtcattttcttaagcagttcggtgacgaacgcatcccgcgcttcgggcgttaatggatggttgccgaataaatcatccgccagtgctggctgcagggccagactcaccgcgattcctacactacatagccatttcatatggatttttcttcctttgttgcccgacgtggcagcgaaaatggtgcaaaaaccgtagtttgccataagcatgatggagagagaaaaagaatgctcagtttattgtctgaattttcaaaatattcactcgctgaattgttatacaaggcgctattctagtttgtgatattttttcgccaccacaaggagtggaaaatgtcttccatgacaacaactgataataaagcctttttgaatgaacttgctcgtctggtgggttctagtcacctgctcaccgatcccgcaaaaacggcccgctatcgcaagggcttccgttctggtcagggcgacgcgctggctgtcgttttccctggcagtctactagaattgtggcgggtgctgaaagcctgcgtcaccgccgacaaaattattctgatgcaggccgccaatacaggcctgaccgaaggaagcacgccaaacggtaacgattatgatcgcgatgtcgttatcatcagcaccctgcgtctcgacaagctgcacgttcttggcaagggcgaacaggtgctggcctatccgggcaccacgctctatagcctggaaaaagccctcaaaccgctgggacgcgaaccgcacagtgtgattggaagtagctgtataggcgcaagcgtcatcggcggtatttgtaacaactccggcggcagcctggtgcaacgtggcccggcgtataccgaaatgagcttattcgcgcgtataaatgaagacggcaaactgacgctggtgaaccatctggggattgatctgggcgaaacgccggagcagatccttagcaagctggatgatgatcgcatcaaagatgacgatgtgcgtcacgatggtcgtcacgcccacgattatgactatgtccaccgcgttcgtgatattgaagccgacacgcccgcacgttataacgccgatcctgatcggttatttgaatcttctggttgcgccgggaagctggcggtctttgcagtacgtcttgataccttcgaagcggaaaaaaatcagcaggtgttttatatcggcaccaaccagccggaagtgctgaccgaaatccgccgtcatattctggctaacttcgaaaatctgccggttgccggggaatatatgcaccgggatatctacgatattgcggaaaaatacggcaaagacaccttcctgatgattgataagttaggcaccgacaagatgccgttcttctttaatctcaagggacgcaccgatgcgatgctggagaaagtgaaattcttccgtccgcattttactgaccgtgcgatgcaaaaattcggtcacctgttccccagccatttaccgccgcgcatgaaaaactggcgcgataaatacgagcatcatctgctgttaaaaatggcgggcgatggcgtgggcgaagccaaaagctggctggtggattatttcaaacaggccgaaggcgatttctttgtctgtacgccggaggaaggcagcaaagcgtttttacaccgtttcgccgctgcgggcgcagcaattcgttatcaggcggtgcattccgatgaagtcgaagacattctggcgttggatatcgctctgcggcgtaacgacaccgagtggtatgagcatttaccgccggagatcgacagccagctggtgcacaagctctattacggccattttatgtgctatgtcttccatcaggattacatagtgaaaaaaggcgtggatgtgcatgcgttaaaagaacagatgctggaactgctacagcagcgcggcgcgcagtaccctgccgagcataacgtcggtcatttgtataaagcaccggagacgttgcagaagttctatcgcgagaacgatccgaccaacagcatgaatccggggatcggtaaaaccagtaaacggaaaaactggcaggaagtggagtaaaaattacggatggcagagtatcgccatccgaattcacttaatcgttctgtgccgtctgccccgccgccgccatttgggcggctttttgttttttatagctcaacgctgctgccggcacaggcatcactttaccggtttcaatccaggtacgcaggcggctggcatcggcaaaatgggtatatttgccaaacgcgtccatcactaccagcgccaccggtttattattgataaccgtacgcatcaccagacaatggcccgccgcattggtaaagccggttttggttaactgaatattccagttatcgcgatacaccagatgattagtattgcggaacggcagcgtatacgtcggattagagaaggttgccatatcttcccgggtagtacttaactgcccgatcaacggatattgtttgctggcaatgagcagtttggttaagtcacgggcagtactaacgttatgcacgctcaatccggtaggttcaacaaagcgcgtgttgttcattccgaggcttttcgctttcgcattcattgccttaataaaggctttgtaaccaccgggataatggtgcgcaaggcttgccgccgcgcggttttcactagacatcagcgccagcaacagcatatctttacggctgatttcgctattcagtcgtacgcggctatagacccctttcatctccggcgtctggctgatatccacttttagtttttcatccagcggcagtcgtgcatccagcacaaccatcgcggtcattaatttgctgatagacgcaatcggacgcaccagatccgggtggttgctatagatcactttgttggtattcagatcaacaatcatcgcgctaccggaggcaatttccggttgactagcggtggtagcggctgccgttttcgcaacggcctgcggtgcaaaaggcacagccagcatcagggccaggctaaataaagaaactcgaaatttcggcatgatgagcattcagatagtggttcacgcgcacgggttgcgcaccgccggagtaaggatttactgaggctagcgacgccatcataacgagcaaaaagtgcgatcgtcaaaggagaatcgtgaggaaatgctgcattgctgacatttacgccagcaatgcaacgtcaaagaactttttagaacaaacgataaccgtagccccatagtataacggttagggcgagcagcacttccagtaccagcacgccaatcgccagcgtgctactagagaagctaaggccttcctctttgttgatattcaggaagctcggaataccaaggtaaagcaggtagccggtgtaaaacagcgccaccgtgccgaccagcgcacacaaccagaccagtggataaagcgccaccagaccgcttaaaaacagcggagttgcaacgtagcccgcgaagaccatgcagtgcgcaagactcggacgctgcggataattacgcgccatccaccagatgacccgccccatcaccgcgaccccagccagcataacgccgtaaaacaagacagccagcgccagtccggtaaaccaggataacttcaggatagtgccatcgccaaaattccagccaatctgtgtagtgccaatgaaggcgcaaatcaccggaatcgccgccatcagcaaaacgtggtgggtgtaatggtgagaaatcgtttcgttttcgcgattaatcacctgcatttcacgatcgggatgggaaaacagtccccagacatggctcataccgcccccttgttgtgagttcatgaacctgacagttcaagtataagtcagcttgtgattattttttgttcgcccatgtaattttcactgtctgatgaacgtcctttttcagcgtgaatgattcacagggtgtatgcttactggcaaccaaagggagacagactggcctatggatctcaatacacttatcagtcaatatggttatgccgcgctggtgatcggtagcctggcggaaggtgaaaccgtgactttgctgggaggcgttgcggcgcatcaggggctattaaagttcccgctggtggtactttctgtggcgcttggcggcatgattggcgaccaggtgctctatctgtgcgggcggcggtttggcggcaagctgttacgccgtttcagcaaacatcaggataaaattgagcgggcgcagaaacttatccaacgccatccgtatctgtttgtcattggtacgcgctttatgtatggctttcgggtgattggcccgacgctgattggtgccagccagctgccgccgaaaatctttctgccgctgaatattctcggcgcatttgcctgggcgttgatttttaccactattggttacgctggtggtcaggtgattgcgccgtggttgcacaatctcgaccagcatttgaagcactgggtctggttgattctggtcgtggttctggtggtgggcgtgcgctggtggctgaaacgacgcgggaagaaaaagccggatcatcaggcgtaaaaccattgccctggataaggcgttcgcgccgcatccgacatccggagtaccatgcctgatacgacgcttgtgcgtcttttcatgccgaccaaaatattacccaatgaaatatccacgcacctcactgcgttattctgggttgaactgtggattcgccaacataaagccgccatccactatcaagctctgcccggtggtgtaatttgcgccctcgctacaaagccacaccaccaggctggcaatctcatgcgttgcgccaaaacgccgcaagggaatgctaggctccgcgtcgggcttcacgtcgctgtcatccatgccattcattggcgtggcgatcgccccaggcgcgactgcgttcaccaaaatcttatgcctgaccagctccagcgccatcgctttggttaacccaccgagcgcatgtttagcggctgtgtaggcgctggcatccggcagcggcgtatgttcatgtacgctcgtaatgttgatgatgcgaccgccctgcccttgtttcaccatctgacgagccgcaatttggctgcataagaatgcaccatcgacatcaacggtaaaaatcttgcgccactcatcaaaagccatatcaagaaacggcgctttggtcattgcacccgcattattcaccagcacatcaatgcgccccagccgttgaatgagtttctccagcgccagtgccccttctggtagattgccgagatccagctgcacgatctccgcacgtacgccgtggctaactacctcacgcgcggtatcttttgccccttcttcatcactgtgccaggtaataccaatatcaaacccctgctgcgccagtaataacgcgcactctttgccgatcccgctatcggaggcggtaataatcgcaacctgtgccatcgagttctccacttaacgctgaataaacgttaagtatagaaggcgcatatcatcagcgtttgtaccccccgcccaacgcaccagtgagttgaatggaggcatccagccactgcccttgcaataacaggccattggcccgctcacgcagcgcggggattctggcttcgctgacgcgggaaccagcaatgatgcccgcgttaaagcgcgcctgcgcaagacctaccacacgcaaggcatcgcgctcaatttgcgcctgatgctggtttttctccgccagtgtctgaacctgactggctgcccgcgccacgtcattcaccgcttcaaccaccgctttgttgtagctggcgatagacaagttgctttcggcttttgcgatatcgagattggcgttaagacgaccactatcgaaaatgggtagcgtcaggcctgccgtaacgcccatttgctgcgcggaatgacggaacagatcgcttaagtgcaacgcatcctgttgcaggaaggccatcaggttgatgtcaggataaaatgccgcttttgccgcatcaatggtgcttaggctactctcaacgtaccagtgcgccgcctgcaaatctgcccgccgggccagtaaggagtaccccagttcatcaggaagctggcttgccactttcggcaacgcgaccggtttaagcttcaaactctttgtctggttatttgtaagtgcgcttaaccgtgcctcaataattttcattttccccgcgacatcgttgagctgctgccgggttttgctggcattaatatcggtttccacaccttcaacactagaagtaatcccgttctgatatagctggcgatcggtcgcgataatggtgttctgctctttttctatttgctgcaagaccgtgtttaacgccgcctgggtttgccactcccagtacaggcgggctacgctgccagccagcaattggcgggtttgctcgcgttccgccgcccgtgctttaaccgtacccaggcgggcagtaacctccgcccgattctttccccagatatcgagatgccagcccgccgttaagccaaaagtaccgttggtgtaccacgggccggtcgtacctgcggccggatcgttcagagcaaacggccccattaagccttctgcgctcattttttgccgctccatatccgccgaaaagtcgatctgcggaccatcctgagtggcaactgccttcgcctgggcttcagctagctgaatgcgctgttcagccacctgcatatccggtgcgttctgtagtgcattgttaattaaggaagactgttgattatcgtgatactccagccaccattggctgtctggccaaccattttcagcgccgtgggtaatgcggtgtcaacttgtgcagcgggcgtttgctggcttaacgcctggcgggtttcatgcataggcgcacacccggccagcatcagtaacagcggaaaacaggcgatggctggataaaaggaatcacgattcatgggggaataatcaggtaagaaaaggtgcgcggagattaccgtgtgttgcgatatattttttagtttcgcgtggcaatacatcagtggcaataaaacgacatatccagaaaaatatacactaagtgaatgatatcttccgatttatcttaatcgtttatggataacggcaaagggcttcgttttttcctatacttattcagcactcacaaataaaggaacgccaatgaaaattatactctgggctgtattgattattttcctgattgggctactggtggtgactggcgtatttaagatgatattttaaaattaattaatgtcatcaggtccgaaaataacgagaatatttcagtctctcatcctgttgcgctcctgtcatgtgcattgcttcatataatcactggcgcaaggagcgcgcagggggcggccaatcgccgccgccccctgcacccccgggctctggcgaacaaaatcgccgctgcgcggtgccctcggcttatcccttacggctaccgggtcgggcgcgaggtaacatccctgtaaaacgcgccctcagcccacatccatgtgggctgccccggccttcagggaacgcctcggcaattttgacgccaccaaacaaccgtgcggcctattgataaagagctaacacattgtcaaaaaacatcactatggttttttagagtttctcgatatcaattgcctgaatagcccttgcaatatcaggggaattattcaacacccgaacatgctgaaataattccgttgcttcatcgtattctttacgcaaataactcaaccactgtttaatccgcgcaacgtgatataacccggtatcgccctgcttttccagacgggtatatttttgcagcaaagcaaccacctccggccacggcattcgcggttcgttatattttaccacccggctcaggttgggaatattgagcgccccgcgaccaatcatcactgcgtcgcagccgctgatcgccatgcattgttgcgcgctctgccagtcccagatttcaccgttggcaatcaccggaatattcagccgctggcgaatatcgccaatcgcctgccagtcaatatgctccgcgcggtaaccctgctctttcgtccgcccatgcaccaccagctccgtagcgccagcctgttgaaccgcatcggcgatttcaaatttcttctcaccgctgtcccagcccagacgcactttcacgctgacgggcaaatgcgccggtacagcttcacgcatcgcttttgcaccctggtagatgagttcaggatctttgagtaacgtcgccccgccgccgctaccgttaaccgttttgctcgggcagccgcaattgagatccacgccccaggaacctaactccaccgcacgggcggcgttctctgccagccattgtgggaactgacctaacaactgcacgcgcaccagcgtaccagatggtgtccggctggcgttttgtagctcagggcaaatgcgatgaaagacttttaccggcagcagttgatccaccacgcggacaaactcggtgatgcacagatcgtagtcgttaacttcggtcagcaattcacgcaccagagagtcaagcactccctccatcggtgccagtaacacacgcatatcatcacccgcaaaaaaatgaggcgctatgttagcgcctatggtcagcggattaaaggtctgcaaagagggattgctgcaaactgcaatccctctctatgcttgatgtatgcctgagttcgctgcgcattgcgtaatgccggggagcgaaaaaataagcgctgatttcttaatgtgatcggtagcacgttttacgaattaattgtatgatgaatccatctcatctggggtgttgattatgagtaagacactgaacattatctggcaatatttacgcgctttcgtcctgatttatgcctgcctgtatgcaggcattttcattgcttccctgctaccggtaaccattccgggcagcatcatcgggatgctgatcctgtttgtcctgctggccttgcaaattcttccggcaaaatgggtcaatccggggtgctacgtactgattcgctatatggcgctattgtttgtgccgattggcgtaggcgtcatgcaatattttgatttgctccgcgcacagtttggcccggtagtggtttcctgtgcagtcagtacgctggtggtttttctggtggtgagctggagtagccaactggtacacggtgaacgtaaagtcgtaggtcagaaaggaagtgaagaatgatggcgaatatctggtggagtttaccgctgacattgattgtcttttttgccgcccgcaaactggcggcacggtataagtttcccttgcttaacccgttgctggtagcaatggtggtgatcattccttttttaatgctgactggcatctcttacgacagctactttaaaggtagcgaagtgctaaacgatctgctgcaaccggcggtcgtcgcgctggcctatcctttatatgagcagctacaccagatccgcgcgcgctggaaaagcatcatcaccatctgttttatcggcagcgtggttgcgatggtgacggggacttccgtggcattgttgatgggcgctagtccggaaatcgccgcgagtatcctgccgaaaagtgtcaccacgcctattgcaatggcggttggcggcagtattggcggtattccggcaatcagcgcagtttgcgtgattttcgtcggcatcctcggcgcggtatttggccatacattgcttaatgcgatgcgtattcgtaccaaagctgcgcgcggtctggcaatggggactgccagccacgccctcggtacggcgcgctgcgccgagctggattatcaggaaggtgcatttagtagcctagcgctggtgttatgcgggataattactagcctgatcgcaccgttccttttcccgattattctggcagtaatgggctaaaatttgcgatgcgtcgcgcatttttgatgtatgtttcacgcgttgcataattaatgagattcagatcacatataaagccacaacgggttcgtaaactgttatcccattacatgattatgaggcaacgccatgcatccacgttttcaaaccgcttttgcccaacttgcggataacttgcaatctgcactggaacctattctggcagacaagtacttccccgctttgttgaccggggagcaagtcagtagcctgaagagcgcaacggggctggacgaagacgcgctggcattcgcactacttccgctggcggcggcctgtgcgcgtacgccattgagcaattttaatgttggcgcaattgcgcgcggtgtgagcggaacctggtatttcggtgccaatatggaatttattggtgcgacaatgcagcaaaccgttcatgccgaacaaagcgcgatcagccacgcctggttgagtggtgaaaaagcgcttgcagccatcaccgttaactacacgccttgtggtcactgccgtcagtttatgaatgaactgaacagcggtctggatctgcgtattcatctgccgggccgcgaggcacacgcgctgcgtgactatctgccagatgcctttgggccgaaagatctggagattaaaacgctgctgatggacgaacaggatcacggctatgcgctgacgggtgatgcgctttctcaggcagcgattgcggcggcaaaccgtagccacatgccttacagtaagagcccaagcggtgtcgcgctggaatgtaaagacggtcgtattttcagtggcagctacgctgaaaacgccgcattcaacccgactctgccaccgttgcagggagcgttaattctgttgaatctcaagggttatgattacccggatatccagcgcgcggttctggcagaaaaagccgatgcgccgttgattcagtgggatgccacctccgcaacgctgaaagctctcggctgtcacagtatcgaccgagtgcttctcgcttaagcctggtgccggatgcggcgtgaacgccttgtccggcttgccagccctctcctggtgtcgaaattcccggcaaacagtttgccgtttcttgcgcaaaaccagcgggtaaagtagcctgatggaaattttccttagatcgagtctcctgcatgttaaagcgcgtgttcctcagcctgttagtcctgatcggcttgctgctgttgactgtgctcggcctcgatcgctggatgagctggaaaaccgcgccttatatctacgacgaattgcaggatctcccctaccgccaggtcggtgtggtgctcggaacagcaaaatattatcgtactggcgtaattaatcagtattatcgctaccgcattcaaggagcgattaatgcctataacagcggtaaggtaaattatctattactgagcggcgataacgcattgcaaagttataatgagccgatgaccatgcgcaaagatttaatcgctgctggtgtcgacccaagtgatattgttctcgattacgcaggctttcgtacgctggattccatcgtgcgtacacgcaaagttttcgatactaatgatttcattattatcacccaacgtttccactgtgagcgagcattatttattgcgctgcatatggggattcaggctcagtgttatgccgtaccgagtccgaaagatatgctgagtgtacgtattcgtgaatttgccgcccgtttcggtgcgctggctgacctttatatttttaaacgtgaaccgcgttttttagggccgctggtccctattccggctatgcaccaggtaccggaagatgcgcaggggtatcccgccgtcacacccgaacagttacttgaattacaaaagaaacaaggaaagtaattatggatgtacagcagttttttgtcgttgccgtttttttccttatcccgatattttgtttccgcgaagcatggaaaggctggcgcgcaggcgcgattgataaacgggttaaaaatgcaccggaaccggtgtatgtctggcgagcaaaaaatcccggactctttttcgcttatatggtggcatatatcggcttcggaattttatctatcggcatgattgtttatcttattttctatcgttaatattcccctctccagttaattattgagaataattattacttcacctgataagctgcggatatcacattcctaaccgcagctatttgtgaatcttttcacagtttaaattcccccgcacgcttagccttaatatcagtacattattatttactaaacgctcgccttaattacctatagcattaaggaagatcacatgccgcaacaaaattatctggatgaactcactccggcttttacgtctttactggcgattaaagaagcctctcgctgtttattatgtcacgacgctccctgtagtcaggcttgcccggcacagaccgatccggggaaatttattcgcagtatctactttcgtaattttaaaggcgctgccgagacaattcgcgaaaataatgccctcggtgccgtttgtgccagagtgtgcccgacggagaaattatgccaaagcggttgtacccgtgccggtgttgatgctcccattgatatcggccgcttacagcgttttgttactgattttgaacaacaaaccggaatggaaatttatcagcccggtactaaaacgctcggcaaagtcgcgattattggcgcaggtcctgccggattgcaggccagtgtgacactgacaaaccagggttatgacgtcacgatttatgagaaagaagcgcaccccggtggctggttgcgtaacggtattccgcaattccggttaccgcaaagtgtgctggatgcagagatcgcccgtattgaaaaaatgggcgtgaccattaagtgcaacaacgaagtcggtaacacactcacccttgagcagctgaaagcagaaaaccgcgcggtactggtcaccgtggggttaagtagcggttccgggctaccgctgtttgagcatagtgacgttgagattgccgtcgacttcttgcaacgtgcacgacaggcgcaaggcgatatcagcattccacaaagcgcattaattatcggcggcggtgatgtcgcgatggacgtagccagcacgctgaaagttctcggctgtcaggcggtaacttgcgtagcgcgtgaagagttagatgagtttccggcaagcgaaaaagagtttaccagcgcccgggagctgggcgttagcatcatcgatggattcacgccagtagccgtggaaggcaataaagtcacgtttaagcatgtacggttaagcggcgaactgacgatggcggcagataaaattattctcgccgtcggtcagcatgccagactagatgcctttgcggagttagagccgcagcgtaacaccatcaaaacacaaaattaccagacccgcgacccgcaagtctttgctgctggcgatattgttgagggtgacaaaaccgtggtctatgccgtgaaaaccgggaaagaagccgccgaggcgattcatcactatttagagggagcttgcagttgttaaattaatatttagagggagcttgctcatgttaacgaaagatcttagcattactttttgcggcgtgaagtttcccaacccgttctgcctctcttctagcccggtaggcaactgctatgagatgtgtgccaaagcctacgacacaggttggggcggtgtggtgtttaaaacgatcggcttttttatcgccaacgaagtcagcccgcgttttgatcatctggtgaaagaagataccggttttatcggcttcaaaaatatggagcagattgctgaacatccgttggaagagaatctggccgccctgcgtcggctgaaggaagattacccggacaaagtattgatcgctagcatcatgggggaaaatgagcagcaatgggaggagctggcgcgcctggtgcaagaagctggcgcggatatgatcgagtgtaacttctcctgtccgcaaatgacttctcatgcgatgggtagcgatgtcgggcaaagcccggagctggtagaaaaatattgtcgggcagtgaaacggggttccacgctgccaatgctggcgaagatgacgccgaatatcggtgatatgtgcgaagtggcgctggcggcgaagcgcggcggcgcagatggcattgcggcgattaacaccgttaaatccatcaccaatatcgatcttaatcagaaaatcggtatgccgatcgttaacggaaaaagcagtatttccggatattccggtaaagcggtaaaaccgatcgccctgcgcttcattcagcaaatgcgcacccatccagaactgcgcgatttcccaatcagcggtatcggcggcattgaaacctgggaggatgcggctgagtttttattgctcggcgcagcaacgttacaggtgaccaccggcatcatgcagtacgggtatcggatagtggaagatatggcaagcgggttgagccattatctcgccgatcagggatttgatagcctgcaggagatggtaggtctggcgaataacaatattgtcccggcggaagatttagaccgcagttatattgtctatccccgtatcaatcttgataaatgtgttggctgtggacgctgttatatttcctgttacgacggcggtcaccaggcgatggaatggagcgagaaaacccgcacaccgcattgtaataccgagaaatgtgtgggttgtctgctttgtggtcacgtctgcccggtgggttgtattgagctcggggaagtgaagtttaagaaaggcgagaaagaacacccggtaacgttgtaaaaccagagacgcatccggcatttggttcctgtcgccggatgcggcttgaacgccttatccggcctacaaaaccatacaaatcagtatgttgagcttattgtaggccggataaaacgcgccagcgttgcatccggcatttggctcctgttgccggatgcggcgtgaacgccttatccggcctacaaaaccacacagatcatgatgttatgtgcgtttatgaccgaatgcggaccacattcacatcatttcttacgcgcgtatttcagactatccagcgctacggcgaagataataatcgcccctttgatgatgtactgccagtatgggtttacgccgatatacgtcaggccatagttgatgacggtaaaaataattaccccggtcaccacgccaatcaccgtccccacaccgccgctgaagcttacaccgcctaccacgcacgccgcgatagcatccagctcatacataaagccgaggttgttggtggcagagccgatacgtccggcttctaacatcccgccaaaggcatagaacacgccagacaacgcgtagatcatcagcaggttcaggccgacgttgacaccagatacttttgccgcttccgggttaccgccaatggcaaaaatgttcttaccgaagcgggttttgttccacaacacccagacgaacgccaccgcaatcaacgcgtagaaggtgatgtaagagagacggaaactccccagcgcgacaaagccctgagcaaaggtagagaagccactgtcaaaaccagaaattgggctcgccccgacaaagtcgtaatagaggctgttgatgccatagacgatgatcatcgtgccgagcgtggtaatgaacggcgtcacgttgagataagcgataatcagaccgttgatcaaaccgatcaccgcaccaatggcacagacaatcagaataaccagcgcaatcggcatcgtcgccatttccgggaacactttgttggcgttatccatggactgcaataatgtcgcagccaccactgccgccagccctacctgacgaccagcagaaagatcggtcccctgggtgacaattaaccctgccacaccgagcgcgataataatacgcacgctactctgggtgagaatattacttaagttcaacagacttaaaaatgttgggtcctggaaaataataatcgccagcaaaactaaaagaacgacgtaaataccgccctctttcaggtaagtaagaaaacttttcttatttaacgcactcatgggaagcccctaatcttaaaggtgcaaagacgcaagacgcagaatttcgttttgcgttgttgtttttgtatcgacaattccggaaacgagaccattgctcatgaccagaatacggtctgttatccctaacaactcaggcatttcagaggagataataataatccccttgcctttcttcgccagttcggcaattaactgataaatttcaaacttcgccccgacatcaataccgcgcgtcggttcatcgagcattaatatttctggttgcgttagtagccagcgaccaataatcaccttttgctgattaccaccggagaggctaccaatttgcgtccgatgacccggcgtttttacccgcatgctatcaatcacccactgggtatcgcttttcatccggctgttatccagtaaaccaactttatttttgtagttgcgaatattggaaattaagctgttaaaaccaatatccagataggcataaattcccgtactgcggcgctcctcagttaccagtgcaaatccatggtttatggcttcgttggcattatggttattgatctgtttgccgtgcaacgttatggtgccagcgcttttctcgcgaataccaaataacgtctcaacaatatcggtacgtttcgcccccaccagaccggcaataccgaggatctcccctttatgcagatcaaagctgacatcgcgaatgctcggctggcgcagactcgtcaggttacgtacctcgaggatgacttcgcccggtttgttttctttgtcagggaaacgctggttaagagaacgcccaaccatcatggcgatgatcttgtccatcgtcagtcctgccagcggttcggtggcgatccactgaccgtcgcgcaatacggtaacttcatcacataactggaagatttcttccattttatggctgatataaacaataccgcagccgcgctcttttaatttacgaataatagtgaacagatgattgacctctttttcggttaagctagaagtcggttcatccataatcacaattttcgcgttataggaaaacgctttggcgatttcgatcatctgcatttggctaacggataatgtgccgacgcgcgcacgcggatcgatatcaatatccagttcgtcaaaaatcgctttggtttcgcggtacattttgtcctgatcgacaaacatgcctttggtgggatatcgccccagccacatgttatccatcacgctacgttgtaataccaggtttaactcctggtgtaccatgctaataccattttccagggcttcttttgcagaatggaaatcgatctctttaccctggaataaaatggtgccggagtctttttgataaataccaaacaggcattttaataatgtgctttttcctgcaccgttttcccccattaatgcatggatagaatgtggccggacttttaaattaacgttatcaagtgccttaacaccaggaaaggacttgttgataccgctcatttccaacaagtattccccggaggacggagtcgtactgctgaccatataattttaccttgttggccatacaataagggcgcagtaatagactgcgcccaatcagtcttatttcttgctgaattcagccaggttgtctttatctacgccaacataaggtacgcggaccactttgttgtcgattttccagttggtgccatcagccgcacctttaccatcggccaggtttttcgccagatcaaaggtcgctttcgcctggttgttagcatcgttcagtacggtgcccgccagtgcaccggatttcaccagcgccagcgcttctggcagcgcatcgacgccaaacaccggaatgctggacttgttgtgtgctttcagcgcttcaaccgcgcccattgccatcgcatcgttgttggcgataaccacttcgattttgttggcgttcgggccagacagccaggcgtccatcttatctttcgcctgagcggtgtcccacattgcggtatctaactgtaactgttcagttttgatgcctttatcgttcaattctttaatcacgtaagtggtacgtgcttctgcatccggatggcccggttcacctttcagcagtacgaactgaatctgaccgtctttgttcagatcccaaccctgattcgccgcccagtgtttagcaatcaaatcgccttgaataatgccggactctttggagtcagtgccaacgtagtaggctttgtcgtagctatccagcgccttacgagacggttctttgttgaagaaaaccaccggcacgttttgcccacgcgctttctcaatcaccgtacccgcagctgccgggtcaaccaggttgattgccagtgccttcacccctttcgccagcaatacgtcgatctgatcgttctgcttggactggtcattctgagaatcattcatcagcagctgaacatctggcgcggctttcgcatcttgctcaatagccttgcgcactacagacataaagttatcgtcgtacttatagattgttacaccaatgcgagtatcagcagcgtgtgcagcggcaccgaataacatgctggccatcacagcagacagggttaacaccttcttattcatggtatctccggtttttcttatgcagggtagtgcttgagataaatgctcggcggggcagtagagttaatgaagtgttactgaacgccgaagctcactttttaaaattcgttcttccatgcccggtaacgctccagaaaacggctttaattgttgttatgacgctgttacctcggcaaaagtgattattcactgttacatacgggttacaacgttaaaacggtgcaatcatagctatcacattgttaagatactgtgaaatcactcacagattgaaagcggttacatcgcctgatttgtactgttagtgatcgccgccgcattctggcgtgttgcgacagaatggcgacgcactaacgtcggcataaaacagtggctggcacgaggatcaatattgcctgctgccccctgcaaggccagttcggtggctaatttcgccatactagcaatgggataacgcacggtcgttaattgcgggtcggtgtaacgggcgatgggaatatcatcgaaaccgatgatactgagatgtaacggaatcgcaatgccattatcttttaatgctgtcagtgcgccagcggccatattgtcgttataagcaaatacagcggtaagttgtagattgcgccccagcagttcaaccatcgccgcctcaccgcccggcatgtccggcgtaccagcgccaatccagctttccggcggaataatatcctgctctttcaacgcactcatccagcctgctttacgcatggcgtcatcttcaatgccgtggctggaagaaagataaccaatacgttgatgaccgttattcagcaacatgcgcgtcgccattcgggcaccgctgagattatccaggcaaacgcaacgatgggcgtaccccggcacaacgcggttgattaacaccataccgggaatgttatccataaattgcgccagttcatcgtcactcaatgctttactgtgaacaatcaacgcattacaacgctggcgaattaacacctcaatggcgtgacgctctttttccgcttcatgatagctattgccgattagcacgtatttctgatgctgctgagcgaccagatccaccgcttttaccagcgcgccgaaaaacgcatcagaaacgtccatcaccaccacgccaatggtgtcgctaacctgagttgccagcgcctgggcattggcgtttggccgataatccagctcactcacggctttcattactgcttcacgcgtgtcggcactgaccagcgtgctgttattgagcacccgggaaaccgttgccacagagacgccagcctgacgcgctacatcacgaatggtgatcatattcactacctgttatgagattgcagtaaatgactgcttgctggcggctattttgtcagcactgaatacaggacttcgtgaatcgagtcacagcaatggaaacggttacagccgttttgttaacgaatgtgatccagatcgttatctacttgttttagatattgccggtccggcagcacgcaaagttaactgacgccagagccattccaccggcccctggcggaagtaacgcagccagataacagagaagaggatattcgccagccataccggaataacaaacgccagcagctccaggcggtcaaaatgcataaacaaaccgaggtggtaaaaaagcgtggtacaaatcagcgtttgcaatagatagttggtcagcgccatccgtccgacgcaggcgatcgcaagcaccagcttaaagcggctcaattgcggccagaagccataaaacaggctcgcatagccaatcgcctgaaacggcgcactcagttcccgcggcatttgaagtaagaaggcacaccagcgatacgcccagtccagctgccattgcagggcgatggcaggaaggttaatggtcaccccaatcgccaccagcacaaaaccagtacgacgatagtgacgtaagctgaactgccctttcagccagccgctgcgcatcagcgccgcaccaatgagcatcatccctgccagttgccagccatactgtgcgcccagtgccagtaaactgttgccaacaccatcggcacgattactgatcgcttcaacgccgccgtgaagcttccagtatttttcatacaaaatagcgcttgcatccggcgtccaggcgcggctggtctggctgtcggaaatcagccccaataacagcaaaacgccaagccccaccagataaagcatgacgcctgtattaaacaggctttttacgcttggcgcatcgcgcaccagccgccagcagattaagcccaccagcccgtaagccagcaaaatatcgccgtcccagaacaataaaccgtgaataaagcccaacaagactaacagcgttaaccggctctggatccagcgtctgccacggggcagcaacatttgcaggcccgcaccaaacagtagcgcaaaaagcgtgaggaatttcacctggccgatgagatcaagaaatgcccaagtccatgcatcccgcggcgtaatagcaccgtaccaggcgggattgagataagccgcctttggtagcccaaaggcgctgatgtttaatagcaggatccccagaatggcgacgccgcgaacaaaatcgagcgtgacgttgcgctccatggttcctgccttttaatcagttgtgatgacgcacagcgcgcagaaactcgtggcgcgtattctgactggatttgaacaatccaccaagagaggtcgttgtcgtggcactggttgcatcgcggatgccacgcgccttcacgcagtaatgcaccgcgtcgatgctgacagccacgttattggtgcccagcagcgtttgtagcgcaataagaatttgctgcgtcagacgttcctgcacctgcggacgctgggcaaagaactgcacaatgcggttaattttactcagaccgatcacgctatctttcgggatataggccaccgtcgctttgccatcgatggtaacaaaatggtgttcacaggtgctggtcagagtgatatcgcgcacggtgaccatttcatcgaccttcattttgttttcaatgagggtgattttcgggaaattggcgtaatccagaccggagaaaatttcatcgacatacattttagcgatgcgatgcggcgtttccatcaaactgtcatcagccaggtcgagattcagcagctgcatgatttcggtcatatgaccagcaataaggcttttgcgcgtttcgttatccatttcatgcacgggcgggcgcagcggtgtttccagtcctcgcgcaactaacgcttcatgaaccagggccgcttctttactgagacttggcatttatgatttctcctgcaggtgtgacgcctccgccctgcgtgggggcaaagttattaagctgatttacagcctgattattgtgcgtgaggcggcgcacataatccagtattcacagcgataattattgtaattgccgctgcctttcatcagcagatgttaaaacatcgttatgcaaatacggaagtgaaagttactcacagcacattgaataaacggtatgatgaagaaattgcaaacaacacaacaaggagccacgcatggaaatgctcgaagagcaccgctgttttgaaggctggcagcaacgctggcgacacgactccagtaccttaaactgcccgatgacgttcagtatctttctccctccacctcgtgatcacactccgccaccagtgctgtactggctttccggattaacctgcaatgacgagaacttcaccaccaaggcgggtgcccagcgggtagcggcggaactggggattgtactggtgatgccagacaccagcccgcgcggcgaaaaggttgccaacgacgatggctacgatttaggccagggcgcaggcttttatcttaatgccacgcaaccgccgtgggcgacgcattaccggatgtatgattatctgcgcgatgaattaccggcgctggttcagagccaatttaatgtcagcgaccgctgcgccattagcggtcacagtatgggtggtcacggtgcgctgattatggcgctgaaaaatccgggtaaatacaccagcgttagcgcctttgcgccaattgtgaatccgtgcagcgtcccgtggggaatcaaagcgtttagcagctatttaggtgaggacaaaaatgcatggctggaatgggacagttgcgcactgatgtatgccagtaacgcgcaggatgcgatcccgacgcttatcgatcagggcgataatgatcagtttcttgccgaccagttgcaacctgcggtactggcagaagccgcgcgccagaaagcgtggccgatgacgctgcgtattcagccgggatatgatcacagttactacttcatcgcctcttttatagaggatcacctgcgcttccatgcgcagtatttactgaagtgaaagtccgcccggttcgccgggcatcttctcatcagaagcgataatccactgccataaagtaacgacgtccgtcttcgttatagctgtagtcgtcacgactgagatccttgtcgccaaggttcagcacgcctgcgcgcagtttgacgtctttagtcacctgccaggccgcgccggtattccagatggtataaccgcccggtgttttagccgtcgcgctgtcggcgcgtttctgcccggtatagtgcccagaaacatagaaactccagtcttccagcgccagcggtttccagtccagcgtaccgttagcagtatggaacggcagatcggatagcggtttgttttcgccgttgctgacatcacgaccatcgttgtaggtgtagttgatgctcagtttccattcatcgttgaacggaattttcagttcggtttccacgccctgaatacgagctttgttaacgttgtagtagctaaataccggtatgcgccgtccgttagcgcccgtctcaaaaccaacaaagttttggtagcccggtgcagcgttgacgtcagacgtacggctgatgctgatacgatctttcacatcgttacggaaaacggtaacgctggattcaaccccttccagccagccttcttcacccatgtagtaaagccccagctcccaactttcgctggtttctggtttcagatccgggctacccacaatcttacatgcgccacggcaggaattgctcgtccagtcagggctaagttgcaacagagaaggtgctttaaatgccgtcgcccagccccctttcaccgttacggtgtcggtggcgttataaaccaggtaggcacgcggactccagtgttcaccgtaggtttcgtgatcgtccatacgcacgccggtcgtcagcgccagcggctcgaagatccgccattcatcttccacaaacagcgcgtactggctggcagacgttttggagctggttcccccggtcaggttcaccgcatcgctaagtttgtcgtgacgccattcaccgccaaccgtgagaaactgattaatcgccgtcagcggcaacgtgtatttgccgtcgaccgtattgctttcggaagttatcgggctgctgttgccagggtttttgttctcgactttctcaccgtagtatttcagttcgctggtgccgtaatcccaacgcccattatggctgacggagtagttctggcgttccaggcggtttttgtccaggctgtcggaatcacgatcctgacggtcgaaaccgtatccggcagtaaaatcgtgattttgattcggtgtccaggcaaattcgacattgccgtcgcggctggagaatccttcaatacgcggcgtttctccggtatcggtggtcgtactgttttgcgggtcatccttttcacgttttgccaggctgccgtaagctttcattcccagcacaccatcaattaatggtccactggtaaagaactgaccgttataggtgtcaccgcgatcgcgatgttcctgaatggtggtatcgacggtaacggtaccgctccatttctgaccgatttttttggtgatgatattcactacaccgccgagcgcatcggaaccgtacaggctgctcatcgggccacggaccacttcaatacgttcgatggaatcgaccgggatccagttcagatcgaaatcattgtggcggaagacggcattgcgggagttcacgcgtttaccgtcgacgagaatcagggtatagctgctgtccagaccacgaatactaacgcccttacggttatccccttcgttcgtcagttgtacgccaggcacttctttgaggacatccttcagattctgtaccggttttcgctgcaggtcttcctgggtaatgacgctgatactggcaggtgcatctttaagattttgttccacggaagatgcagtgacaaccatcgtttcgccatcatcatcgaccgctaacacaggccatgcacaagaaatagcggacaaacacagcccgacccgtacgaaagggttcaacctaaacattccatatctccatgaggtaactacgaaaataaaatgggttatcgctcacatcttcttcacgtccccttgcgtacggcagcatcgcggtggacttattttttatgcaggtgatcatcccagaaagccggaacagcctctgatttgtcagccttttttgattgcggcgtaacgataatgcaaacgataacaattatcaatccaaatgttaaattttatatccgcatgatttgtcagggaaatggaattgaaaaagccctctcggttgagagggcttagcaaggaagggaggaaacttatttcttatcgttctgcgggaacttcatttcgctgtagcgtacgaagtgagttcctttaatcagcttgtagccgaaccaaataatcaggaacagcgggataccaatatacgttgccgctacgccgccccagtcaatagtatctttcaggaacgcttcgtagttctggcccaaagtgataatcagacacagaatgaatgcgaagatcggccccagtgggaagaaaccactacggtacggcagatcgttaatgtcgtgtccctgcaatacgtaaccgcgacggaagcgatagtggctaatggcaatccccagccaggcgataaaacccgtcatcccggaggtgttcagcagccacaggtataccgtctggttgccaaacatggaggtcaggaagcacagaccggcaatcaccgtcgtcgcatacagcgcattacgcggcacgccaccacggctcagtttagcgaaaatgcgcggcgctttaccgtcacacgccagggtgtacagcatacgagtagacgcatacataccggagttacccgcactcagcaccgccgtcagaataactgcgttcatcaccgccgccgcagagagcagacccgcgtgctggaacaccagggtgaacggactaacgctgatgtctttaacatcgttacgcagcaggctcggatcggtgtacggaataatcaggctgataatcaggatcgcgaacacatagaacaacaggattcgccagaacacctgacgtaccgcgcgtggaatgtttttcgccggatcttcggactcgcctgcagcaataccgatcagctcggttccctggaaagagaagccgacaatcatagctacgccgatcatcgccgcaaaaccaccagcaaacggcgcttcgccgattgtccagttgctccagcccgcaggctgcgcgcctttgaagataccgataatcatcagcacgccaacgatgataaagacaataactgtcgtgactttgatcagactgaaccagtattccgcttcaccaaagccacgaacactgatgtagttcagcaggaagataacgccgaggaacaacgcactccagatccagcccggtgtatccgggaaccaccagctcatgaccagctgagctgcaaccaggtcaacggcgatagtcaccgcccagttgtaccagtagttccagcccagcgcgaagccaaagccttcttcaacatagttctgaccgtaagtggcaaagctaccggaaaccggcatatatgcagccagttcaccgagactggtcatcaggaagtaaaccatcaggccaatcagcatatagctgagcaatgccccgcccggacctgcctgagaaatcgttgcgccagaggcaacaaaaagacctgtaccgatggaaccgccaatggcaatcatcgtcaggtgacgcgcctttaattcacggcgtaagcccggcgcttctgtggttttagtttcggaaaccatacaaaaatgctatccatcttaaaaatgaggcgcgattgtagcagacgattggcaatccttccggcagaaatacacggttataagacaccttcatgatcgcccagggattataagtaaagcagccaatctcttttctggcgaatgcatgctgaaggcgctgcgtcacgaaatcgacacagcaccagcatgttcttgtacagcaacttaacgcggcacatttgcgggatcgcaatagtccagaaagcgccgtagcgcgttggaaaggtgtttttgccgatgatgtatacgccacaacgtacgcatcaggcgcggcagagggaccgcaacttcacttaatgtgcctgcctgcaattgatcttcaatcacacgtcggctcaggcaactaattcccaacccatgacgcaccgcatgtttgattgcctcggagttacctaattccatcgccatctcaaacttcggtaaatgactcagcaacagataatcgacaatctcccgcgtgccggaaccgcgttcacgcaggatccacggcgcagcggccagctgttctaaggtgaccggaccacgggccaacgggctagtcggcgcggcgaaaaccaccagctcgtcttccagccacggttcagaaatgatttcagtgctgtggcacggtccttcaataaagccaatatcaacgcggaaatccagcaccgcttgcatcacgtcctggctattcccaacgctaagttcaatcggcaactgcggataatcatggcgataacgggcgataactgcaggcagaatgtagttaccgatggtactactggcatagatacgaatcgcgccgttgtcttcgcgaaacagttgttcgatttcaaccgcctgttcaagcaatgccaacgcacgcggatagagcagccgcccgtgttcattaacaaccagtcttttccccacgcgatcaaacagttgcacgccaagctgcccttccaggtcggtcaaggctgcgctcactgcactttggctcaacgccagcatcacgctcgcctgggtggtacttccacttttcaatacttctgcaaaaacttccaactgccggagggtgatgtgcatagtcgcttaccacttataaagattaattataaatatataatcaattttatttttaaaccagttagtcgtaaccttatgcccggttaaaggagagggttatgacgaatatcaccttacagaaacaacatcgtacactgtggcattttattccggggttagccctgagtgcagttatcaccggggtcgccctgtggggtggttccattcccgcggttgcgggtgccgggtttagtgccctcaccctcgcaatcttgttggggatggttttaggcaacaccatctatccgcacatctggaaaagctgtgacggtggtgtgctgtttgccaagcaatatttattacgtctgggtatcattctttatggcttccgtctgacgttcagccaaattgccgatgtcggtatcagtgggatcatcattgacgtgttgacgctgtccagtaccttcctgctggcttgcttcctggggcagaaagtgtttggtctggataagcacaccagctggttgatcggtgccggtagcagtatctgtggtgctgccgcggtactggcgactgagccggtagtgaaagcggaagccagtaaagtaaccgtggctgttgcaaccgttgttatcttcgggaccgtcgcgattttcctctacccggcgatatatccgctgatgtctcaatggtttagtccggaaactttcggtatctacattggttctactgtgcacgaagtggcgcaggtggtggcggcaggtcatgccatcagcccggatgcggaaaacgcagcagttatttccaaaatgctgcgcgtgatgatgctggctccgttcctcatcctgctggcggcgcgtgttaaacagctgtctggggcgaacagcggcgagaaaagcaaaatcactattccgtggtttgccatcttgttcatcgtagttgccatctttaacagcttccacctgttaccgcagagcgtggtgaacatgctggtaacgctggataccttcctgctggcaatggcgatggcggcgctgggtctgaccactcacgtcagcgcgctgaaaaaagctggggcgaaacctctgctgatggcactggtactgtttgcctggctgattgttggtggtggtgcgattaactatgtgattcaaagcgtcatcgcataaaccactacatcttgctcctgttaacccgctatcattaccgttttcctccagcgggtttaacaggagtcctcgcatgaaatacattggagcgcacgttagtgctgctggcggtctggcaaatgccgcaattcgcgccgccgaaatcgacgcaaccgcgtttgccttgttcaccaaaaaccaacgtcagtggcgtgccgcaccgctcacgacgcaaaccatcgatgaattcaaagccgcctgtgaaaaatatcactacacaagcgcgcaaattcttccccacgacagttatctgattaacctcggacatccggtcactgaagctctggaaaaaagccgcgatgcctttatagatgaaatgcagcgttgcgaacagctggggctttctttgctcaacttccaccctggcagccatctgatgcagattagtgaagaggattgccttgcgcgtattgccgaatccatcaacattgcgctggataaaactcaaggtgtgacagcggtgatagaaaacaccgccggtcagggcagtaacttagggtttaaattcgaacatctcgcggcgattatcgacggcgtggaagataaatcccgcgtcggcgtctgcattgatacctgccatgctttcgctgccgggtatgatttgcgtactccagccgaatgcgagaaaacattcgcggattttgcccgtactgtcggctttaagtatctgcgcgggatgcaccttaacgatgcgaaaagcacctttggcagccgcgttgaccgccatcatagcctcggtgaaggcaatatcggtcatgatgcgttccgctggatcatgcaggacgaccgtttcgacggcattccgctgatcctcgaaaccatcaacccggatatctgggcagaagagatcgcctggctgaaagcgcaacaaactgaaaaagcggtagcctgaagatgaataaccgggaaaaggagatccttgcaattttacggcgtaacccgctgattcagcagaacgaaattgcggacatgctgcaaatcagccgtagccgcgttgcggcgcatattatggatttaatgcgcaaaggccggattaaaggcaaaggttacattctcaccgagcaggaatactgcgtagtggtggggacaatcaatatggatattcgcgggatggcggatatccgttacccgcaaagcgcttctcatcccggtacaattcattgcagtgcgggcggcgtgggacgcaacatcgcccacaatctggcgctgttaggccgtgacgtccatttgcttagtgtgattggcgatgacttttatggcgaaatgctcctggaagaaacgcgccgtgccggcgtgaatgtctccggctgcgttcgtttgcatggtcaaagcacaagcacgtatctggcaattgccaatcgagacgatcaaaccgtgctggcgattaacgatacccatctgctggaacagttgacaccgcaactactgaacgggagccgcgatttacttcgtcatgcgggcgtggtactggctgattgcaacctgacagccgaggcgctggaatgggtctttaccctcgctgatgaaatcccggtgtttgtcgataccgttagtgaattcaaagcgggcaaaatcaaacactggctggcgcatattcacaccctgaaacccactttaccggagctggaaattttatggggacaggcgatcaccagcgatgctgaccgtaataccgcagtgaatgcattgcatcagcaaggtgttcagcaactgtttgtttatttgcccgatgagagtgtttattgcagcgaaaaggatggagaacaatttttgctgaccgcgccagcgcatacgacagtagacagttttggtgctgacgatggttttatggcgggcctggtatatagctttcttgaaggatacagtttccgcgacagcgcccgttttgcggtagcctgcgcggcaattagccgcgccagcggcagcttaaacaaccctaccctgtctgccgataacgcgcttagtttagtgccaatggtgtaacaatgttgccggatgcgacgcttaacgcgtcttatccggcctacaaatcaggcaatttcagcaagtaaatgtaggcctgataagcttgcgcatcaggcaatgacactcaagctaaaccaataaagaacccggcaatggtcgcactcatcaagttggaaagcgtcgccgccgccagcgcccgtaaaccaagctgggcgatttccggcgcacggtgtggcgcaaccgcagaaaacgcccccaccaccaccccgatagaaccaaagttagcgaaaccgcacaacgcgaaggaaataatcgccacagttttagcatcgagagtgccagccgtttgcagatagggactgaaattgagataagcgacaaattcatttattgccagtttctgtccaatcaaactcccggcaagattcgcatcactccagtccacacccatcacccacgccagtggagccagcaggtaacctaaaatggactccaggctggcatgttcaaaaccaaaccagccaccaacgccgccgataataccgttaatcaacgcaattattgcaacaaatgccatcaccactgttgccacacctgcggcgattttcagcccggtcattgcccctgtcgcagcggcttcaataatgctttttggcggtgtttcggtgaaagagaggttattaaaggaaacctggctagattccgttgccgggcttaacaggcgggcaaacaagatcccgccagggatcgccattaaacttgccgccagcagatattccacaggcacgcccagtgcggcgtaaccaatcattgtgctaccagcaatgctggccatgccactacaaatcgctgtaaataattcattgcgattcagacgatcgataaagggtttgacgattgccggaatttcgttttgcccgaggaaaatggtggtgaccgcgacgaaactctcgatcttgctgatatttaatgctttctggaagataccgccgagaattcgaattaaaatccccatcacaccgatgtagtagagaatactcaccagcgcggtgacgaagataattgccggtaacaccctgaaaccaaagataaatcctgcaccatcaaataaggtatccattttcggtccgaccagagaaccgaagataaatgcgctacccgcgtcgctgtacgccatcactttatgcacgccaaaagcgactttttcagcgacccaacgccctggcggtaaccaaagcataatgccgccaatcacgacctgtaacactaacgccgcgccaacggtacgcaggctgatcttcttcttgtttacactcagtaaaaacgcaatcgtcagcaataccaccattcccagaacacttctcatgacatccatagtgattatctcttcatgtcatattgggcgacggctttctgcccatcagaaatagccaggcctgcatcttgcgataccggcccggcttgttatcaacacttaatgggttttgatgtagccgcgcacgcactcttcgactaatccccagaaccagtctgtatcaatagtgatgccgactttggtattggcgggcttgccaagaacgcccagctcgtcgcagacggtacgcccatagcaagggccactgttgacgtccacttcgacgtacatctcctgggttttaatgccatcagggttaatcagataaccgatgcaggtggcgtcgtgcaccgggccgccagcaaggccgtagttttcgaactgcgttttgagagtgaagttcatgatgtcgctgaacagctctccggcggggccgcctgccctttccatccgagcaatcacgtccggggtgcaaacggtctggttggtgagatcgaggcccatcatcactaatggaacgccggaggtgaacactacgcgtgcggcttccgggtcggcaaagatgttgaactcggcagatggcgtgaagttgcctgtaccgtaagcgccgcccattagcacaatttcacggattttgggcaggatcgcgggttgcatacgcattgccaccgcgatattactaagcggaccaaccggcaccagagtgatatcgccatcgcttgccatcagggtatcaatgatatatttcaccgcatgagtgctttctgcctggcgggtcagcggctcgaataccgggccatccagtccggtttcaccgtgaatattatcggcaacgatttgttgacgcataatgggctgcggcatccccgcataaaccggaacattaatctccagtttctggcaaacattcaggccattaattaatgttttatcaagcgtctgattacccgctacaatagtgatgcctaataaatctattgccggatgtttcgccgccatcattatagcaatagcatcatcatgacccggatcacaatccagaataatttttctcttttccattgtttatttcctctgtttccagttgcgttattttttctacagcaaagaaaattcgaccgggccgatgattgaatcttaacaacagcgtacgtatgctaaatatgagaaatctcatagcggataaacatcgtgaaagaaatccacaataatgatcttaagcagcaattgatgagtgaatccgcgtttaaggattgctttttaacggatgttagtgccgatacgcggctgtttcattttttagcgcgtgactacattgtgcaggaagggcaacagccgtcctggctgttttacctgacgcgaggccgcgccaggctttacgccacgctagctaatggtcgcgtgagcctgatcgatttctttgccgccccctgttttattggcgagattgagttaatcgataaagaccatgaaccgcgtgcggtgcaggctattgaagagtgttggtgccttgcgctccctatgaaacattaccgtccgctgttattaaacgacacgctatttttacgaaaactctgcgtcaccttaagtcataaaaattatcgtaatattgtttctttaactcagaatcaaagttttccgttagtgaatcgcctggcagcatttatattactcagccaggaaggtgatctttatcacgaaaagcatacgcaagcggcagagtatttaggcgtttcttatcgacatcttttatatgttctcgcgcagttcattcacgacggtttattaattaaaagcaagaaagggtatctcattaaaaacagaaagcagttgagtggactggcgctggagatggacccggagaataaattctccgggatgatgcagtaaaaattattttcaatagcgcgattgccggatgcaacgcttaatacgttttatccggtctacaaatcgagcattacgccagaccaataaagaacccggcaatagtcgcactcatcaggttggaaagcgttgctgctgccagcgcccgtaaaccaagctgggcgatttccggcgcgcgttttgggctaatagcgctaaatgcgccaacgacaacaccgatagaaccaaagttagcaaaaccacaaagcgcaaaggagataatcgcaatggttttcacttccagcgtgccgcccgtttgcaggtatggggagaaactcaggtaagcgacgaattcgttaatcgccagtttctgcccaatcaggctacccgcaagattggcatcactccagtccacacccatgatccacgccagcggtgccagcacatagccaaaaatactttccagagaggcattggcgaaaccaaaccagccgccaattccgccgataatgccgttgatcagcgcaataattgcgacaaacgccattaccaccgtcgccacaccagcggcgatttttagcccggtcatcgcaccgctcgccgccgcttcgataaagctttttggcggcgtttcgctgaagctcagattttcaaatgtgacctggctaggctcggttgccgggctaagaatacgtgcaaacaaaatcccgccagggatcgccatcaggcttgccgctaacaggtagtcaattggtacgcccattccggcataaccaatcatcatgctaccagcaatggacgccatcccgctacaaattgcggtaaacaactcgttgcgattcatgcgatcgataaacggtttaacgatcgccgggatctcattttgcccgaggaaaatagtagtaaccgcaacaaaagattcgattttgctgatgttgagggctttctggaaaatgctgccaaggatgcgaatcagcagccccatcacgccaatgtagtacagcagactgatgagcgcagtaacgaaaataatcgccggaagtacgcgaaaggcgaagataaaacccgcaccgtcaaacaggacatccattttcggcccaaccaggctaccaaaaatgaaggcgctaccggcatcactgtaagacatcactttatgaacgcctaatgccgcctgttctactgcccattttcccggtgggaagtagagcatgatgccaccaatagcgatttgcagcagcagtgcggctccaaccgtgcgcaaactgatgctctttttattcacactcaacagaaatgctattgccagtaacaccaccatccccacaacacttctcattatatccataatgattttcccttcatgccggtaaacccggcgtcagcgccaggttttggtatgcttgatgagtacgggcgacggctttctgcccgtcagaaattaacccgcgagacgctgatattctttggcaatttcgctcgccagaatggcgttgttgaacaccagctggatgttggatttcaggctgtcaccgccggtcagttcagcaacgcgcgccagcaggaatggcgtactttctttaccaatgactccctgagcttcagcttcagctaccgcctgatcgatcgccgcattgatagtgtgttccggcatagcaaactgttccgggatcgggttcgctaccacgaggccaccgttcagaccgctttgccatttcaccaccattgcacgggcaatttcgctggcgctgtcgagacgaatgctgacgtcaaacgggctggtgcggcagaaaaacgcaggcagcgctttagtctgatagccaattaacggcacaccgaaggtttctaaatactcagtggttaatcctaaatcgagaatagatttcgccccggcacaaacaacggtgacattagtatttgccagttcttgcaaatcggcagaaatatcgaaggtatgttccgccccgcgatgcacaccaccaattcccccggtggcaaatactttaattccggcaagcgccgcaataatcatcgtactagccacagtggttgcgccattttttccggcggcaacaacaaaaggtaaatcgcgacgactaactttggtcacgttatgcccttcacgacccagtaattcaatttcttctttgcttaaccccactttcatcacgccgccaataatggcgatcgtggcaggtacagcgccctgtttacgaatagtttcttcaacttcaattgcggtctgggcattttgtgggaacggcatcccgtgagaaataatggtgctttccagcgccacaaccggttttttgttttttaaagcgtcctgcacttccggggaaatttgtaataattcaggggaaatttttaattcagacattctgcgttctccactaagcttataacgttggcaatgcttaaatcggggttattggtgtattcacaggagagcgccatactgctacatccctgtgcgaaacgaacagattcggcaaacggcattccgtctacccaacagctagcaagtcccgccatcatggcatcgcccgctccggtaacattaataacattggttttgatcggcgcagaccagccactttcaccgctgatatcgctgtaataaacgccgtcgccgcccatgctcaataccagtcggttcaggccatgttgatggaaccaggcagcaacttttgccacatcttcacgcccactcagcgcaatcccactcagggtttccgcttcaaggcggtttggcttgagagtgtggatctgatttagacggtcgcgcactttgacacatttccatgcgctaaccggatcgacaaatacgggtacgttggcggcattatccagaatccatgccagtgcctcttcactgatattacagtccgcgacaatgacctttgccctctgaataaattcaccgtgctgtgcgagatattcagctgtaatagcgttgctaatattcatgtcatttatagcaaccagcatttcaccggtattatcgagtaaacttaaataactgctcgtattttctcccggcacaatcaggcatttatcgacataaacgccagattgattggtttgcgttagcaggctttgaccataaaaatcactgcctacggcgctcagtagccaggctttgttacccagcaacgccaggttttgtgcaatattgcgccctactccaccaggcgtaaattttattttacctggattactatccgcataatttaaactttcatgactatatccggcgacatcaatattcgcgctacctataattacgacataatccttttcgcgcatagcacgtcctctggtaaaaaattaccaaccctgtcaatccacaagaatatagatactgcaaagacggtttaaacatgtgttcatatttaaacatgtgctcatagtatgcatgttttacgtaaagtaaattaccgccagagaggcaaaatgggcagatttgagcaggctcacaaaatgcgattaaatgcctgaattacaaaagcgaggaatttgtgacgggatgcacagaacagaacaataaaaaagggcagaaaataatctgcccttgaggaaataacctgagtgtttgatgaacgtttgaagtttctactgaaagataaaaccatttaaattcataaaattacattcacaaaccggtcattctctttgcgctcatcaaatgttacaggacaggaaatttctgccctgtaacacaccttttattacgctgctttcgctactgcgtccacttccggacgtttcaggaaggcataggccaaacccgccaccagcgtaccggcaataattgctaccaggtaacccaataccggcgtaatagcgccagggatcagcagaacaaacagaccaccgtgcggtgccatcagtttcgcaccaatcgccatactgattgcgccagtcagcgccccacccacgatacagcacggcagcacacgcatcggatcacgagcagcaaacggaattgcaccttcgctaatgaagcacagtcccaataccagagcggctttgccaccttcctgctgcgctttgtcgaatttgcgacgcgccaccattgttgccagacccattgccagcggtggcaccatacctgccgccataatcgccgccatcgggccataggtttgagtactcagcagacccacaccgaatgcgtacgctgctttgtttaccggaccgcccatgtcagtacacatcatgccaccgaggatcgcccccagcagaaccgcattcgcagtccccatggtctgcagccagtgagtcagcccttcgagaatgccagcaactggtttaccgatcaggtagatcatcgccagaccgaccaccagactggaaattagcggaatgatcaggatcggtttcagcgcctccatactctgtggcagtttcaattgcgtactgattaacttcgcaatgtaaccagccaggaagcccgcaataataccaccaatgaagccagaaccggtgctgaccgccagcataccgccaatcagacccggagtgaggcccggacgatcggcaatggaaaaggcaatataacctgccagtaccggcaccatcagcgcaaaggcactaccaccaccaatctgcatcagcgccgcagccaacgtacccggctctttaaacgcttcgataccaaaagcaaaagaaagcgcgatacacagaccacctgcaacgaccatcggcagcatgtaagaaacgcccgtcagcaagtgacggtatgcgcctgcactctctttcttactttcagtggtcgccgtttgagctttgcccgccggttcatacggcgttgcttcagcaaccgctttatccagttcctgcgcggttttcttcagcgccagaccggtagaggtacgatacatcggtttaccagcaaatttcgccagatccacttcgatatctgccgccacaatcaccagatccgctgctgcgacttcttcgggagtgattgcattacccgcgccaacagaaccacgggtttcaactttcacccaccagccacgttttttcgcttcggtttcaatggcttcagccgccataaaggtgtgtgctacgccagtcgggcaagcagtcaccgcaactacgcgtttcggaccgctggcggcaactggtgctgtcgcagcgaccggcgcagtgtaaggtttcgcatggcctttggcttcactcaggaacagctcagggtgcgcaactgcccgggaaatatcgcccagccagacatttttaccgttcagcgcgctgtcgttcgggatggaatcaccgagaacaatcgccatttcagcgtcgttcggattgtcgatgatttccagttttgcttttcgcgccgccgcgcccagcagggtcttcgccatataggcgcgtgcctgaccgagattagcgtcaataatcagcagcgttttcattatgcctctcctgctgtcagttaaaaggttgtaagtcgacgcgcgccatcattgcggccaactgcggacgatcggtaatacccacattgctttgacttaccgccagggctgcaacagctgtcgccagacgcagtgtgtgttcactggattcacgcatcagcaagccataaatcaggccaccaaccatagaatcccctgcgccaacggtgcttacgacatcgacactcggtggtttggcgatccattcgccggaggcattaacccaaagcgcgccttcggcacccagactaataacaacatgcgcgatgccttgttcacgtagcgcatgtgcagcttcaatcacatctttcatttcaggcagtttacggcctgcccagatttccagctcgcggcggttaggtttcaccagccacggtgccgctttcaaacctgctactaacgcttcacggctactatcaaagataatgcaaggacactgactacgcaggcgagtcatccagtcggtgaacgcttccgggctgacgccactcggtaagcttccgctgacacagaccatatcgaactgaccgagccagctcagagaatcagtcacaaagcgttcccagtcggcgggggtgacttcaaaaccgctgaagttgaagtcggtcacttcgccgtctttttccgtcagcttaacgttaattcgggtgcgcccctgtacaacctggaaacggttggcaatgcccagctcgctgaacagttgctgaaaaccatcctgattgtctttacccaggaagccgccaacggtgacatcaattcccaggtcttttaatactttggccacgttgatgcctttacccgccgcatgcagaccggtggttttcaccaggttcacttcgccgcgttcaatttccgggcagaaaccaacaaggtcataagccggattaagggtgatagtagcaacacgtctgctcattatgcgccctccccaagaccagcagcgatagcgtcgccgattgctttcagcgcctgttcagcatctgcaccctgggcggtaaagcgtaggcgatgacctttcttaacgccaagtgccacaactttcatcagactacgtccgtttgccggtttgccggtaccatcaaggtttgtcacggtaatatcactgttaaattgtttaatggtattgaccagcatggtacctggacgagcatgcaggccgtgttcattgcgcaccacaaactccgcgcttaacacgtcgtcggtcggcgcatcatcgctggtcagcagcgccagcaacgttgccgcatccgctttcagcaagcggtcagctttattgtcgagcaataaatcagcgagacgcttaagaaccgcgatgggctgatcgtcattcatcgccacactcaccagcatggctgccgtttcgccgtccacatcaaaagcatttgccgcacggcttaccgcaatcgcgctacgcagattgccttcggcgctatcgctcagccagataccctgtccgagattcagcggttgttcattgatggctttggtgacgaaagtggcgtcaactgcccccgcctctttcagacgcgcagcgttcagcgcctgaagagtcagcagatcgctggcgacgatatccagtgtcagcatttcgttgtcgagcttcagctgctcactctgcttttcgcccatcagtaatgcgcgaagttcttctgctgttgttgcactcttcagttgttcagcaacggaatcatcgctcagtacgtgggtcagctggcgtagcaggcccagatgttcatcgctgctggcagcaataccgattgccacgtacgctacctgaccgtcaccccaggtgacgccttccgggaactgaaatacctgaacgccggttttcagcacctgatcgcgggtgtcggtagtgccgtgtggaatagcaataccattgccgaggaacgtactggtttgctgttcgcgcgccagcatgccattgacgtagccttctgctacattaccggcctgcaccagcgccgcagcgacctggcgaatcgcctcttctttgtctccggccttttcgcccggatggatgtcctgtacggataactggaacatagttctcctctcttgctgaattgaaacgattcagcctctatgagaaaaaaagcgccaacctggcttagggttaaagacaagatcgcgctgaaacgtttcaagaaagcataatacttctgtttcagcacgcaaggaaagccgtaaagttatgagcaaaagtttgatgtgctgcacaattttttgccatttttcctaattgctgatgggaaaatccgttatcagcaatttcatttcagcagcgtcagcagccaatcagcaacagtgaaatggcattttgactattcgtggcgcttttgatttcgctgtctgtttattttctgacaagcagcgtaaactccgcgtcttcctcttccagtgatcgaccagcatgcataactcccccgcagtctccagcgcgaaaagctttgacctgaccagcacggcgtttttaatcgttgcctttctcaccggtattgcgggcgctctgcaaaccccgacactcagtatttttcttaccgatgaagtacatgcccgtccggcgatggtgggattcttctttaccggcagcgctgtcattgggattctggtaagtcagtttctcgccgggcgctctgataagcgcggcgatcgcaaaagcctgattgtcttttgctgcctgttaggcgtgctggcctgcaccctttttgcctggaatcgcaactactttgttttgctattcgttggcgtctttcttagcagctttggcagcaccgctaacccgcaaatgtttgcccttgcccgtgaacatgccgacaaaaccggacgtgaggcggtgatgttcagctcttttttacgcgctcaggttagtctggcatgggtcattggcccaccgctggcttatgccttagcgatgggtttcagctttacggtaatgtatctgagcgcagcggtagcgtttattgtttgcggtgtgatggtgtggctgtttttaccgagcatgcgaaaagagcttccgctggcgaccggcacgatcgaagcgccgcgccgtaaccgtcgcgatacgctgctgctgtttgtcatttgtacattgatgtggggcagcaacagcctgtacatcatcaacatgccgctatttattatcaacgaactgcatcttcccgagaaactggccggtgtgatgatggggaccgccgccgggctggaaatcccgacgatgttgattgccggatatttcgccaaacgtctgggtaagcgtttcttaatgcgcgttgctgccgtgggtggcgtctgtttttacgcaggaatgctgatggcgcatagtcctgtcattctgttgggcttgcagctgctaaatgctatttttattggcattctgggcggcatcgggatgctctattttcaggatctgatgcccggtcaggcgggtagtgccaccacgctctataccaacactagccgcgtgggctggatcatcgcaggaagtgtggcgggcatcgtcgccgagatctggaattatcacgctgtgttctggtttgcgatggtgatgattatcgccactctgttttgcttactgcggattaaagatgtttaaggcgcggtcagcatttccagatcgataagccaggtcatggcctgctgacggctgttaccgcacatttcagcgctggcttgtaagcctgcacagactttcggtcgcagtgggctggtgaaaattttacagcgttgctgttcatcaagctgaatgcagggcgtattggcgggcttgccatctggcataccgggaatagggctggaaatactaggggcagtgcaacacgccccgcaacccggacggcattccatacgttgttctcttaaggttaaccaccggattgatgagcgcgcacagtaccaccttttttgcaccagcaaaagtgcgaataccacttgcccgaaaggcccgtcgcgagtactttgtcgcgatatttttgacattttcgactacaggaatttttcgatgccaagagcgaacgaaattaaaaaaggtatggtactgaattacaacggcaaactgctgctggttaaggatattgatattcagagccccactgcccgcggtgccgctacgctgtacaaaatgcgtttttctgatgtccgtaccgggctgaaagtagaagagcgtttcaaaggtgatgatatcgttgacaccgtgacgctgacccgccgttacgttgacttctcctatgtcgatggcaacgaatatgtctttatggataaagaagactataccccgtataccttcaccaaagatcagattgaagaagagttgctgtttatgccagagggcggcatgccggacatgcaggtgctgacctgggacggtcaactgctggcgcttgagctgccgcagaccgttgatctggaaatcgttgaaaccgcaccaggcatcaaaggggcatctgccagcgcccgtaacaaaccggcgacattgagcactggtctggtgattcaggtaccagaatacttaagcccgggcgaaaaaattcgtatccatatcgaagaacgccgttatatggggcgtgctgactaacttcagccgcatgcagaaaagggatagctcaggctgtcccttttttaatttattataccaatcttctattttgcgcttcctgaacaccttacgccctcaattttcactcgttgattgatcgccctcacacttcatcgcattaacaatccagaccaatttcaattgctgtcatataactttacactgtcgttgttaattaatcgttactaagacgtgactcctatgaatacaatcgcctccgttacgctcccgcatcatgtacacgctccacgctatgatcgccagcagttgcaaagtcgtatcgttcattttggctttggagcctttcaccgcgctcatcaggcgttactgaccgatcgtgtgctgaatgcccagggcggcgactgggggatctgtgaaatcagcttgttcagcggtgatcaactgatgagccagctccgcgcacagaaccatttatataccgtgctggagaaaggtgcggacggcaatcaggtgataattgtcggtgccgttcacgaatgccttaatgcaaaactggattccttagcggcaattattgagaaattttgcgagccacaggtggcaattgtttccctgacgattaccgaaaaaggctattgtattgacccggccaccggtgcactcgacaccagtaatccgcggattattcacgatctacaaacccctgaagaacctcactccgcaccgggtattctcgtcgaagcactgaaacgccgccgtgagcgcggccttacaccgtttaccgtgctctcctgcgacaatattcccgacaatggtcatgtggtgaaaaacgcggtgctgggaatggcagaaaaacgtagcccagaactcgccgggtggataaaagagcacgtcagttttccgggaaccatggtcgaccgcattgttccggctgcaaccgacgaaagtctggtggaaatcagccagcatctgggggtgaatgatccctgcgcgattagctgcgaaccgtttatccagtgggtggtggaagataacttcgtcgctgggcgtcctgcctgggaagtcgcaggtgtacaaatggtgaatgatgtcctgccatgggaagagatgaaactgcggatgcttaatggcagccactcttttctcgcttatctgggttacctcagtggattcgcccatatcagtgattgcatgcaggatcgcgcatttcgccatgccgccagaacattaatgctggatgagcaagcgccgacactgcaaattaaagatgtcgatttaacacaatatgcggataagttaattgcacgttttgctaatccggcgctgaaacataagacctggcaaatcgcgatggatggcagccagaaattaccgcaacgcatgctggcaggtattcgcatacatcaggggcgcgaaacggactggagcttgctggcattaggcgttgcaggctggatgcgttacgtcagcggcgttgatgatgccggaaatgccattgatgttcgcgatccgcttagcgataaaattcgcgaacttgttgcgggcagcagcagtgaacaacgcgtaaccgccctgctttccctgcgtgaagttttcggtgatgatctgccagataacccgcattttgtgcaggccatcgaacaagcctggcaacaaatcgtacaattcggcgcacatcaggcgctattaaacaccctcaaaatttaacgatttctgcggttaaagcggatgaagctcaccttcgtccgctctccccttctcttttctgccttttttagccaggattaacgctcagttaacttaccagagtattgcggagccgttgtgaccaggaccaacctcatcaccggttttctcggcagcgggaaaaccacgagcattcttcatctgttagcccataaagatcccaacgaaaaatgggcggtactggttaatgaatttggggaagtcggaattgatggtgctttgctcgccgatagcggcgcattgctgaaagagatccccggcggctgcatgtgctgcgttaatggtttacccatgcaggtagggttgaataccttactgcgtcagggaaaaccagaccgcttgttgatagagccgaccgggctgggccatccgaaacagatcctcgatctgttaaccgcaccagtctatgaaccgtggatagatctgcgcgccaccttgtgcattctcgatccgcgcttgctgctggacgaaaaaagcgccagcaatgaaaacttccgtgaccagctggctgccgcagacatcattgtcgccaataaatccgaccgtacgacgcccgaaagtgagcaagcgctacagcgttggtggcagcaaaatggtggcgatcgacaattaattcacagtgagcatgggaaagttgacggtcatcttctggatttgccgcgtcgcaatttagccgagttgcccgccagcgccgcgcattctcatcagcatgtcgtgaaaaaagggttagcagcgttaagcctgccagagcatcaacgctggcgtcgcagtctgaacagcgggcaaggatatcaggcctgcggctggatattcgacgctgatacggtattcgacaccattggcattctggaatgggcgcgacttgcaccggtggaacgcgtcaaaggcgtgctgcgtattcccgaagggctggtgcgaatcaaccgtcagggcgatgacctgcacattgaaacgcaaaacgttgcgccaccggacagccgtattgagctgatttccagcagcgaagctgactggaatgccttgcagagcgcgctgttgaagcttcgtttagcgactaccgcgtaaggttgcctgcgtttttcagtaagataattagagaaaatatgattaaaaatttgccgcaaatagtgttgttgaatattgtcggcctcgcgctgtttctttcctggtatatccccgttaatcatggattctggttgccgattgatgcggatattttttatttctttaatcagaaactggtcgaaagtaaggcctttttgtggctggttgcattgaccaacaatcgcgccttcgacggttgtagtctgctggcgatgggtatgttgatgctgagtttctggctgaaagaaaacgcccctggcagacgacgtatcgtgattattggtctggtcatgctattaactgcagtggtattaaaccagctgggtcaggcattaattcctgtaaaacgggccagcccaacattgacttttaccgatattaaccgcgtcagcgaactgctctctgttcccacgaaagatgccagtcgagatagctttcccggcgatcacggcatgatgctgcttatttttagcgcattcatgtggcgttatttcggcaaagttgcaggccttatcgcccttattatttttgtggtttttgcatttcccagagtaatgattggcgcacactggtttactgacatcattgtcggtagcatgaccgtgatattgatcggtttgccctgggtgttgctgacgccattaagtgatcgattaatcaccttttttgacaaaagtctaccaggaaaaaacaaacatttccaaaacaaataactcacagtaattaacatcatcagggttatttttatagtgaggataatcctgatgatgcgcaccgtgctttcatctatcgaacgcaaaaatcattctctaagtaaatgaatggattgcatgcgtttcactcaattgtactttaattgaccaaccccgcttattaactttctgtatcactttttcttataaaaaatcatgtaaaaccgctcgccaagaccgcaccaatcgggtaatctcgaactcgttttgcctcggcggtagattatcctcacagcatataattttgtgcgttagtccacagatttggccttaaggaattgtttcaacatgcccaggtaattagtctcgtgtcgcttggcatttttttataacgatatttgtcgttaaggacttcaagggaaaacaaacaacatggtcaaatctcaaccgattttgagatatatcttgcgcgggattcccgcgattgcagtagcggttctgctttctgcatgtagtgcaaataacaccgcaaagaatatgcatcctgagacacgtgcagtgggtagtgaaacaagtagtctgcaagcttctcaggatgaatttgaaaacctggttcgtaatgtcgacgtaaaaagccgaattatggatcagtatgctgactggaaaggcgtacgttatcgtctgggcggcagcactaaaaaaggtatcgattgttctggtttcgtacagcgtacattccgtgagcaatttggcttagaacttccgcgtagcacttacgaacagcaggaaatgggtaaatctgtttcccgcagtaatttgcgtacgggtgatttagttctgttccgtgccggtagtacgggacgccatgtcggtatttatatcggcaacaatcagtttgtccatgcttccaccagcagtggtgttattatttccagcatgaatgaaccgtactggaagaagcgttacaacgaagcacgccgggttctcagccgcagctaataaaccgtttggatgcaatcccttggctatcctgacgagttaactgaaagcactgcttaggcagtgcttttttgttttcattcatcagagaaaatgatgtttccgcgtcttgatccaggctatagtccggtcattgttatcttttaaatgttgtcgtaatttcaggaaattaacggaatcatgttcatacgcgctcccaattttggacgtaagctcctgcttacctgcattgttgcaggcgtaatgattgcgatactggtgagttgccttcagtttttagtggcctggcataagcacgaagtcaaatacgacacactgattaccgacgtacaaaagtatctcgatacctattttgccgacctgaaatccactactgaccggctccagccgctgaccttagatacctgccagcaagctaaccccgaactgaccgcccgcgcagcgtttagcatgaatgtccgaacgtttgtgctggtgaaagataaaaaaacattctgtagttctgcgaccggtgagatggacattccactcaatgaattgattccggcgctcgacattaataaaaacgtcgatatggcgatcttacccggcacgccgatggtgccgaacaaacccgcaatcgtcatctggtatcgcaaccctttgctgaaaaatagcggcgtctttgccgctctgaatctcaacctgacgcctagtctcttttatagtagtcggcaggaagattacgatggcgtcgccctcattattggcaatactgcgctatctaccttttctagtcgtttgatgaacgttaacgaattaaccgacatgccagtccgtgaaactaaaattgcgggcattcctctgaccgttcggctttatgcagatgactggacatggaacgatgtgtggtacgcatttttactgggcggcatgagtggaactgtcgttggcctgctctgctattacctgatgagcgtacgtatgcgccccggcagagaaatcatgaccgccatcaagcgcgaacaattttacgtggcgtatcaaccggtggtggatacacaagctttgcgagtaacgggcctggaagtactgctacgctggcggcatcctgtcgcgggagaaattcccccggatgccttcattaactttgccgaaagccaaaagatgattgtgccgctgactcagcacctgtttgagttaattgcccgcgatgccgcagaattagaaaaagtgctgccggtaggcgtcaaatttggtattaacattgcgccggaccatctgcacagcgaaagctttaaagcagatatccagaaactgctcacttccctgcccgcacaccatttccagattgtgctggaaattaccgagcgcgatatgttgaaagagcaagaagccacacaactcttcgcctggctgcacagcgtcggcgtagaaattgctattgatgacttcggcaccgggcacagcgcgcttatctatcttgagcgttttacgctcgattatctgaaaattgaccgtggatttatcaacgccatcggtacggaaacgatcacttcccccgtacttgacgcggtgctgacgctggcgaaacgcctcaatatgctgacggttgctgaaggggtcgaaacgccggaacaggcgcgatggctaagcgaacgcggcgttaatttcatgcaaggctactggattagccgcccgttaccgctggacgattttgttcgctggctaaagaaaccgtatacgccgcagtggtaaggtgtgcttacgtcccttattattcatagtgaaagcatgccggattgcggctaatgatgagtaaaaggaaatccgttgcagatgattgtgcgcatactgctgctgtttatcgctctgttcacctttggtgtgcaggcgcaggctatcaaggaaagctatgcctttgccgtgctgggcgaaccccggtacgcgtttaatttcaaccattttgattatgtgaaccccgccgcgccaaaaggtgggcagataacgttgagtgccctcggcaccttcgataatttcaaccgctatgcactgcgcggcaacccgggcgcacgcaccgagcagctgtacgacacgctatttacgacttccgatgacgaaccaggcagttattacccgctgattgctgaaagcgcacgctatgctgacgattattcctgggtggaggtcgctattaatccgcgcgcccgttttcatgatggtagccccattactgcccgcgatgtagagtttacttttcaaaaatttatgaccgaaggcgtgccgcaatttcgtctggtctacaaaggcaccaccgtcaaagccattgcaccgttaaccgtgcgcattgagttagctaaacccggcaaagaagatatgctgagtctgtttagcctgccggtatttccagaaaagtactggaaggatcacaaacttagcgacccgctcgccacgcctccgcttgccagtggtccgtaccgcgttacgtcctggaaaatggggcaaaatattgtctattcccgtgtgaaagattactgggcagcaaacttaccggtaaaccgtggacgctggaatttcgacaccattcgctacgattattacctcgatgataatgtcgcctttgaagcgtttaaagcaggtgcctttgatttgcgtatggaaaacgacgccaaaaactgggccacgcgttataccggtaaaaatttcgataaaaaatacatcatcaaagatgagcaaaagaacgaaagtgcccaggatacgcgttggctggcgtttaatatccaacgtccggtattcagcgatcgccgggtccgggaagctatcactctcgcctttgactttgaatggatgaacaaggcgttgttttacaatgcctggagtcgcacgaacagttattttcagaataccgaatacgcggccagaaattaccccgacgccgcggagctggtgcttctggcaccaatgaaaaaagatctaccgagtgaagtcttcacacaaatctaccagccgccggtatccaaaggcgatggctacgatcgtgacaacctgttaaaagccgacaaacttctcaacgaagcgggctgggtgctgaagggtcagcaacgcgttaatgccacaacgggtcagccactcagctttgaattattgcttcccgcaagcagcaatagtcagtgggtattgccgttccagcacagcctgcaacggctgggtatcaacatggacattcgcaaggtggataacagccaaatcactaaccgcatgcgcagtcgcgactatgacatgatgccgcgcgtatggcgggcgatgccgtggcccagttccgatttacagatttcctggagtagcgaatatatcaattccacttataatgcccccggcgtgcaaagcccggttatcgacagcctgatcaaccaaattattgccgcgcagggaaataaagaaaaattactgccgttggggcgagcactggatcgcgtattaacgtggaattattacatgctgccaatgtggtacatggcggaagaccgtctcgcctggtgggataaattctcccagccggccgtgcgccccatctatagcctcggtatcgatacctggtggtatgacgtcaataaagcggccaaactgccgtccgccagcaaacagggagagtaaatgggcgcttacctgattcgccgtctgttgctggtgatcccaacattatgggcgattatcaccatcaactttttcatcgtgcaaattgcgcctggcggtccggtcgaccaggccatcgccgccattgagtttggtaatgccggagtattacccggcgcaggcggtgaaggtgttcgtgccagccatgcgcaaacgggtgtcggcaatatcagcgacagtaattaccgtggcggacgcggattagatccagaagtgatcgctgagatcactcatcgctacggttttgataagccgatccacgaacgttacttcaaaatgctctgggactacatccgctttgattttggcgatagcctgtttcgcagcgccagcgtgctgacgctgattaaagacagtctgccggtttccatcaccctcggattgtggagcacgctgattatctatctggtgagcattccgttaggcattcgcaaagctgtttataatgggagccgctttgacgtctggagtagcgcatttatcatcatcggctacgccattccggcctttttgtttgccatcctgctgattgtcttcttcgcgggcggcagctatttcgacctgttccctctacgcggcctggtttccgctaactttgatagcctgccgtggtatcagaaaatcaccgattatctgtggcatatcacgctgccggtgctggcgacagtgattggtggctttgcggcgctgaccatgctgacaaaaaacagtttccttgatgaagtgcgcaagcaatacgtggtgaccgcgcgtgcgaaaggggtaagtgaaaaaaatattctctggaaacatgtgttccgcaacgccatgctgctggtgattgccggttttccggcgacgtttatcagcatgttttttaccggcagcctgctgattgaggtgatgtttagtctcaatggtctgggcttactgggctacgaagcgaccgtcagccgcgattatcctgtaatgtttggtaccttgtatattttcaccctgattggcctgctgctgaatattgtcagtgatatcagctatacgctggttgatccgcgtattgattttgagggacgttaatgagccgactcagccccgtcaatcaggcccgttgggcgcgttttcgtcataaccgtcgcggctactggagcttatggattttcctcgtcttgtttggtttgagtttgtgttctgaacttatcgccaacgataaaccgttgctggtgcgttatgacggcagttggtatttcccgttattgaaaaactacagcgaaagcgattttggcggcccgctggcaagtcaggctgattatcaggacccgtggctgaaacaacggctggaaaataacggctgggtactgtgggcaccgattcgctttggtgctaccagtatcaactttgctaccaataagcccttcccttctccaccctcccggcaaaactggctgggaacggatgccaacggcggcgatgtgctggcacgcattctctatggcacgcggatcagcgttctgtttggcctgatgctgactctctgttccagcgtgatgggcgtgctggcgggggcgctacaaggctattacggcggtaaagtcgatctctggggacaacgctttattgaagtatggagcgggatgccgacgctgtttttgattattttactttccagcgtcgtacagcctaacttctggtggctgctggcaattactgtcttgtttggctggatgagtctggtcggcgtggtgcgggcggagtttttacgtactcgtaatttcgactacattcgtgcggcacaggcgcttggcgtcagcgatcgcagtatcatcctgcgtcatatgttgcctaatgccatggtcgcgaccctcacctttttaccgtttattttatgtagtagcataaccaccctgaccagcctcgatttcctcggcttcggtctaccgctcggtagtccgagtctcggtgaactgctgttacaagggaaaaataaccttcaggccccgtggcttgggatcaccgccttcttgagcgtggcgatattattgtctttgctgatctttattggtgaagccgtccgcgacgcatttgatcctaataaggcggtgtaacatgacgcaaactctgttagcgattgaaaatttgagcgtgggttttcgccatcagcaaaccgtacgtacagtagtcaatgatgttagtctacagattgaggctggcgaaacgctggcgctggtgggtgagagtggtagtggcaaaagcgttaccgcgctgagtattttacgcctgctcccttccccgccggttgaatatctctccggcgatattcgttttcatggcgaaagcctgcttcacgccagcgatcaaacgttgcgcggtgtacgcggtaataagatcgccatgatttttcaggaaccgatggtgagcttaaatccattgcataccctggaaaaacagctttatgaagtgcttagtctccaccgcgggatgcgtcgggaagcggctcgtggcgaaattcttaactgccttgatcgcgttggtatccgccaggcggcaaaacggctgacagattatccgcatcagctctccggcggcgaacggcagcgggtgatgattgcgatggcgctgttaacgcgaccggaattattaattgccgatgaaccgaccaccgcactggacgtctctgtccaggcgcagattttacagctgttgcgcgaactgcaaggcgagctgaatatgggcatgctgtttattactcataacctcagcattgtcagaaaactggcccaccgcgtggcggtaatgcaaaacggtcgctgtgtcgagcaaaattacgccgctacgctatttgcaagtcccactcatccttacacacaaaagctactcaacagtgaaccgagtggcgatccagtgccgttgccagaacctgccagtacgttgctggatgttgaacagcttcaggttgccttccccattcgcaaagggattttgaagcgcattgtggatcataatgtggtggtgaaaaacatcagttttacgctacgagcgggtgaaacactgggtttagtgggcgagtccggttccgggaaaagtacgacgggactggcgctgctgcgactgattaattctcagggcagcatcatctttgacggtcagccactgcaaaatttaaatcgccgccagctgttacctattcgtcatcgcattcaggtggtatttcaggatccaaactccagcctcaacccacgactcaacgttttgcagattattgaggaaggcttacgggttcaccagccgacgctttctgccgcacaacgcgaacaacaagtgatagccgtgatgcatgaagtgggattagatcctgaaacacgccaccgttatccggcggagttctctggtggtcagcgacaacgtattgcgattgccagggcattaattcttaagcccagcctgatcatacttgatgaaccgacaagtagtctcgacaaaacggtacaggcgcaaatattgacgctattgaaaagtttgcaacaaaagcatcaactggcctatttgtttatcagccacgatttgcacgttgtccgcgcgttatgtcatcaggttatcatactgcgacaaggggaagtagtggaacaaggaccgtgcgcgcgcgtgtttgccacaccgcagcaggagtatacgcgtcagctactggcgttgagctgacgcttaaaaaggattgtagttactaaagggttcggcaattgccacaccaaaatttttcaatcggcatgttgcagcaaactcgtcctggcgatttacaaacaggcacggctcaccttcacactccagcacgctacatggaacttcgatgtcgcttaacgcctggcttagtttatacatcacgctccatgcattatcaccatccgggctaagcaatttaagcgccaccaggctgttgtcaccgcacggtccattttgcggaatcggttcaaccttgctacctgcgaaaccagcagaccagcgatagttctgcggcagtcgatggacgatactgagttgtaaactagtcacttattttccccggaagcacattcacttcacaatttgtttacatcaattttaacacatcatcaacaatccgtctttatacagatcgtaaagattgatgcctcgcctgcgtggcctctatggctctgatttaagtaatatctgcgggcgtggtcacgtttgcggggctatatgtacccgtttctgcgatctaactcaacctttttaactacaatgatgtgactttttacataaattgattttacataaaataaacatatatcgggggaatgatagatttgtggttgacatgcatcaacaaaggaagccttttagcttcctcgttgtgcaatagatcaccgttttttcggccgactggcgtacagacagaagagaatggagctggttgcgcagaatgcaatactccaaatcatcggccatgcagagttaaaggtcgcaagagaaagcaatgcgccaacaattgcccctatgccaaaacggaaggttcctgccaggctagatgccgttcccgccatatggggaaactcatcaagaatgaccgccatcgcattggaactcaccatgctcacgcagcccacaaacgccgcaacgccaaccaccaggctccaaaatcccagccccagcagcgcactgatgaccatccacgctgccataataaattgtatccacaacccgctgcggaacatatttaacgcgccaatgcggcggacgaagcggctgttaaagatggtcatcacgaacagaaaaacaatgtttagcgcaaagtaataaccaaagttttccggcgcgacgtggttaatttcaatataaacaaacggtccggcgcttaagaaactgaacatcccggcaaagctgaaaccactggcaagcatgtagctcaggacacgtttatggcggaacagcgccgcaaagttaccaatagtggtacgaatgtgaaatggctgacgacgctccggtggtaaggtttctttaatcaggaagaaaatcattgcgctagccagaatcgccgctaatgccaggatccagaagatgtaatgccagctcagccacaccagcacccagccgccaactatcggtgccatcagcggtgcaatggttgtcaccagcatgacaaagctcatcatccggctgaactcttctttcgggtaaatatcgcgcatcagggcgttaatgaccacgctggccgcagccgcagccagcccgtggaagaaacgcatcacaatcagctgatcgatggtgtttgccaacgcacacgccaccgcggcggcggcaaacaccagcgtaccgccgagcaccaccggcttacgcccgaagctgtctgccatcggcccgtagattaactgccccaacgcaaagcccagaatataagtactgagggtcatctgcgtactgcccgccggtacgccaaactgcgcactaattaccggtagcgcgggcagatacatatcaatgctcagcggcatcaacatggccagcaggccaaggataaaaacaatagcaaagctgctatgctgtcgggtggtcacaacgggctcctgaaagtcattgaaaagttagacgacgctggcaatttcttcttcagttaacggacgatattcaccgggggctaaatcagcatccagcgtaataccgccaatacgttcacgatgcagctcaaccacgtggttacccacggcggcgaacatgcgtttcacctgatgataacgcccttcgctgatggtcagacgaacctgcgttggggtaatcacttccagcaccgcaggcttagtgagatctttttcgttatgcagctgcacgcctttagcaaattgctctgccgtatcgtcagctacaggactttccagtgtcaccagataggtcttctcgcaatgatggcgcggagaagtaatgcggtggctccactgaccatcatcagtcatcagcaccagaccggtggtatcaatatccaaccgccccgccgcatgcagtttccacgctaccggttcatcaagaaaatagagcaccgttgggtgatcagggtcgtccgtggagcaaacatagccctgaggcttattgagcatgaagtaacgtggaccgtgttgctgcgccagcgggttgccatcgtaagcgacatcatgttcaggaagcagtttgaacgctgcattacggacgatttcgccatcgacggtgacacgattgccgcggatttcacgcccggcaatagcacggctaacgccgagttgctgtgcgataaatttatcaagtcgcatgtgtgtgattttgcctgtaaaaacggaggtcgggcattgacccgaaaatctgaactgttgtctgcccagtatagcggtctaataacatccctcaagggaaaaagatccatggcatactattagcagaataatctacctacgcgagaccatgatttttacacttcgcccatatcagcaagaagccgtggatgccacgctcaaccattttcgtcgtcataaaacccctgccgttatcgtgctgcccaccggcgcaggtaaaagcctggtgatagcggaactggcacggctggctcgtggtcgcgtgctggtgctggcacacgttaaagaactggtggcgcaaaaccatgcaaagtatcaggcgctggggctggaagccgatatttttgccgccgggctaaagcgcaaagagagccacggtaaagtggtatttggcagcgtgcagtctgtcgcccgtaatcttgatgcctttcagggtgaatttagcctgttgattgtcgatgaatgtcaccgtattggtgacgatgaagagagccagtatcagcaaatcctcactcacctgacaaaagtgaatccccacttacgcctgctggggctgactgccacgccttttcgattgggcaaaggctggatctaccagtttcattatcacggcatggtacgcggcgatgagaaagcccttttccgtgactgcatttatgagctgccgctgcgttatatgattaaacacggctatctgacgccgccagaacgactggatatgccagtagtgcaatacgatttcagccgcttgcaggcacagagtaacgggctgttcagcgaagccgatctcaaccgtgagctgaaaaaacaacaacgtattaccccgcacatcatcagccagattatggagtttgctgcaacgcgcaaaggggtgatgatttttgccgcgacggttgaacacgcaaaagagattgtgggattactgcctgccgaagatgcagcactgattactggcgacacccccggcgctgagcgcgatgtgttaattgaaaattttaaagcccagcgttttcgctatctggtcaacgtcgcggtactgaccaccggatttgacgccccgcacgtcgatcttatcgccattctgcgccctaccgaaagtgtgagtctttaccaacaaattgtcgggcgcggtctgcgtctcgctccgggcaagactgattgcttaattcttgattatgcgggtaatcctcacgatctctacgcgccggaagttggtacaccaaaaggcaaaagtgacaacgttccggtacaggttttctgccctgcctgcggttttgccaacaccttttgggggaaaacgaccgccgacgggacattgattgaacactttggtcgtcgctgtcagggatggtttgaagatgacgacggtcatcgcgaacaatgtgacttccgtttccgttttaaaaattgcccgcaatgtaacgcggaaaacgatattgccgcccgccgctgccgcgaatgtgacaccgtactggttgatccggacgatatgttaaaagcggcgctacgactgaaagacgcgctggtattacgctgtagcggcatgtctttgcaacatgggcacgacgagaaaggcgaatggttgaaaatcacctattacgatgaagacggcgcggatgtgagtgagcgtttccgtctgcaaacacctgcccagcgtaccgccttcgagcagctttttatccgcccgcatacgcgcacaccgggcatcccgctgcgctggatcaccgccgccgatatcctcgcccagcaagccttattgcgacacccggattttgtcgtcgcccgcatgaaaggccagtactggcaggtgcgtgaaaaagtgttcgattacgaaggtcgttttcgtctggcgcacgaattacgcggttaatggtagttttgattgatgtataaggcgattgagtatagaatctcgcccgcttttgcatacgcaaagcagatcacttacctgttgctgggtcgcctgtagcaggattaatttaagagagaaagaaatgtttactatcaacgcagaagtacgtaaagagcagggtaagggtgcgagccgccgcctgcgtgccgctaacaagttcccggcaatcatctacggtggcaaagaagcgccgctggctatcgagctggatcacgacaaagtcatgaacatgcaagctaaagctgaattctacagcgaagttctgaccatcgttgttgacggtaaagaaatcaaagttaaagctcaggacgtacagcgtcacccgtacaaaccgaagctgcagcacatcgacttcgttcgcgcttaattgctgaataagttgtaaaaaaccccgctccggcggggttttttgtatctgcagattatgcctgattacggtattgctattttttgcaggccagataaggcgttcacgccgcatctggcattcagaacacaaaaccgattaattgccgccagacgtccggcgctgcaattggtcgcgcaaattcggcggcgtgcctttaatggtcaaggtatcggttgctggatcccagaagatgcgttcacctaacagcatcgcatcaaagttaatagtcaagccaccgccgctaccggcaaacttcgtcaactgacgcagtgtgctacggtctgccgggaagctctcttccagttcgtagcctttttcagccgcaaactccgtgaagctcacttcgcttacgcctgccagctctttgctcaggcttttcagttcgatctcttcgcctgcctgcagctgctcattacagtagctataaacctgctggcgcacgttctgtcgctctgctttatccagttgtgcttcggcagtgaaatcatcaaccgcttgcaacagcccacggttttgcgctttcgcgtttaacccttcgctggccccgaggaaatccataaagaaatccgccactttgcgccctactcgccctttcaggaaagtgagatagcgggtggactctggattggtttcccattcggttaaatcgatacgcgcaacaatatccgcatgattgatatcaagataatgggttgggttgatgtcgagattttcgttaacgcgcatactgctcaggttgctcagaactgccaccagcaaatactccaccgccagatagcgatagtggcaaaacagcacgaatccaccgtcagcaaaaggatatttcgctaattcgtcacgcaggcggccggttgccgcgcggctaaatgccaggaagtcctcttcgccctgacgctgtaagcgcagcgtctgcgccagttcactctcttcgctaaacaagccgtaagctttatttttggcgctatagacccgatgcagttctgccaccatctcaacgacggtttctgtcggttccagcaaactatcgcgcaacaccagctcaaggttctgctcatcacgcttgataagctggtgcagagcaatctggttgatatccagactcatgataaactctcctttaagaccgggcggtattcaaccaccgccggttaagcgacgcaataaaagatggcggtcattttacagaaggcagcgtaacgagaatgatttaacgcataaaaaagcagaaaaaaaaccgttgctacggtaatatgttgccctttcatcaactaactgatttcgatttatgccacaaatttcccgctacagtgatgaacaggttgaacaattgctcgcagagctgctcaacgtactggaaaaacataaggctccgaccgacctttccctgatggtgttaggcaacatggtcactaaccttatcaacaccagcattgccccggcccaacgccaggcaattgccaactcttttgcccgcgccttacagtcctctatcaacgaagacaaagcgcactaagggaaacagataacaggttatggtaactcatcgtcagcgctaccgtgaaaaagtctcccagatggtcagttgggggcactggtttgcactgttcaatattctgcttagcctcgtcattggcagccgttacctgtttatcgccgactggccgacaacgcttgctggtcgcatttattcctacgtaagcattatcggccatttcagcttcctggtgttcgccacctacttgctgatcctcttcccgctgacctttatcgtcggctcccagaggctgatgaggtttttgtccgtcattctggcaacggcgggaatgacgctattactgatcgatagcgaagtctttactcgtttccatctccatcttaatcccatcgtctggcaactggttatcaacccagacgaaaatgagatggcgcgcgactggcagctgatgttcatcagcgtgccggttattttattgcttgaactggtgtttgcgacgtggagctggcaaaagctgcgcagcctgacgcgtcgtcgacgcttcgcgcgcccgctggccgcattcttatttatcgcctttatcgccagccatgtggtgtatatctgggccgatgccaacttctatcgcccgatcaccatgcagcgcgctaacctgccgcttagctacccgatgacggcgcgacgttttcttgagaagcatggtctgcttgatgcgcaggagtatcaacgccgtcttattgagcaaggtaatccagacgccgtttccgttcagtatccgttaagcgaactgcgctatcgcgatatgggcaccgggcagaatgtgctgttgattactgtcgatggcctgaactacagtcgcttcgagaagcagatgcctgcgctggcaggttttgctgagcaaaatattagcttcacgcgccatatgagctccggcaacactacagacaacggcatctttggcctgttctatggcatcagcccgagctatatggacggcattctgagcacccgtacgcctgcggcattaattactgcgcttaatcagcaaggctatcagctggggttattcagtagtgatggctttaccagcccgctgtatcgccaggcattgttgagtgatttcagcatgccgagcgtacgcacccaatccgacgagcagaccgccacgcagtggatcaactggctgggacgctacgcacaagaagataaccgctggttcagctgggtttctttcaatggtactaacattgacgacagcaatcagcaggcatttgcacggaaatatagccgggcggcaggcaatgtcgatgaccagatcaaccgcgtgctcaatgcactgcgtgattctggcaaactggacaatacggtggtgattatcactgccggtcggggtattccactgagcgaagaggaagaaacctttgactggtcccacggtcatctgcaggtgccattagtgattcactggccaggcacgccggcgcagcgtattaatgctctgactgatcataccgatctgatgacgacgctgatgcaacgcctgctacatgtcagcacacctgccagcgaatatagccaaggtcaggatttgttcaaccctcaacgccgtcattactgggttaccgcagcggataacgatacgctggcaattaccaccccgaaaaagacgctggtactgaacaataacggtaaataccgcacttacaacttacgtggtgaaagagtgaaagatgaaaaaccacagttaagtttgttattgcaagtgctgacagacgagaagcgttttatcgctaactgattaattataaatcagttagcgaaatatcttacttgcaatcggtgtggaaaacggtagtattagcagccacgagtcggcacgtagcgcagcctggtagcgcaccgtcatggggtgtcgggggtcggaggttcaaatcctctcgtgccgaccaaaaatcccaagaaaaaaccaacccttacggttggtttttttatatctgcaattaattcgataaacagaccgtgacacatcacagcctgtttattttctgttatcagaacgtcctgagctttcatcctatgaaattaattgctgttaaaagcattgggtacagaaaatacccatagctccatacccggagtcagtttttaaaaactgtttaaagaaatgcacaagtattgtgattgattttttagttgtttttcttgatgagaagctgatgcaaaattccgtctttataatgaaaatgatgccaaagcgaacgacaaggttgtagttttcactacatgtccatacataaaatggggtaacattcacgcgcctggtagcgttaccaacgctacgctcaaacataatgattctaataaaacctcaggagactactatgcctgaagcaacaccttttcaggtgatgattgtggatgatcatccacttatgcgacgcggtgttcgtcagttactggagcttgatcctggctctgaagtggtcgccgaagcgggcgacggcgcgagcgctatcgatctggcgaatagactggatatcgacgtgatcttgctggatctcaatatgaaaggtatgagtggcctggatactctcaatgccttgcgcagggatggcgttaccgcgcaaattattatcctgaccgtatccgatgcctccagcgatgtctttgcgctgatagacgcaggcgcagacggttatctgttgaaagacagcgacccggaagtattgctggaagcgattcgtgccggagcgaaaggcagcaaagtctttagcgaacgcgtcaatcagtacttacgtgaacgtgaaatgtttggcgcggaagaagatcccttcagcgtgctgacggagcgcgagctggatgttctgcacgagctggcacaggggctgagtaataaacagattgccagcgtgttgaatatttccgagcagacagtaaaagtacatattcgcaatctgctgcgtaaactcaatgtccgcagtcgcgtggcggccaccattctgttcctgcaacaacgcggggcacaataaaaatagcccgatggatttatcatcgggctgagatttatgacaaacgcaaaactgcctgatgcgctacgcttatcaggcctacgtggatcgatcaatttattgaatttacacaattttgtaggccggataaggcgttcacgccgcatccggcataaactaagcgcactttgtcaacagtctagcccgatggcatcaccatcgggcctctttttatttactctcctgcgggctcaaatgttgcatcgcctgcgcgatactacgttcaatcaccgcacggcgagtatcgttggcaggtaagagtttcaacatcatctcccacgcggcaacggcttcgccaaatcgctgctgctcaaaggcattaaacgcatacatgcttagcacacggatattgctatggtccgttctcaccagctgacgtagcagttcaccgccgaggcggttgtcgttgggatcagaactacgagtcaacgcttcagcgtatcccagtgcagcatcactgtttttcggatcgaggcgatacgcagtggcgtatgcatcggtggcgatactggcgttacccagcgccatgccaacgcggcccaacataatccagccttctatatctcccggatttttttgcagttgagtacgcatccccagcgcaagacggctcatctcttcttcgttgagcggatcggctttcggatccagcgccctgtccagcaacgccggagcctgtgccgtggcctgctgccagattttcacctgctgataattgccagtctggtagtagctgacgccagccacaattaacgccaccacaatacccggcagataaacaacatatccggcacgcttaccttccggcacgctttgttcaggaaacgcttccggcaccacgcgtacccgacgccggctgcgggcgtatatgacccaaccgccaatgccaatagccactactggcagcacccacagcagcacggtcagcggcgttaacggcggatcgtaagtgacgaagttgccgtaacgcgccaccatataatcgacaatctcttttttacttttaccttcctgcatcagttcatacactttctgacgcaggtcggtggcaatcatgctgttggaatcggcaatgctgttgttctggcatttcgggcagcgcagttcttcagtgagctgacggaactgttgttcctgtgcttcatctttaaactgcaacacatcgatggtcgccagcgcactgccggagatcatcagcatcagcacgcccaataaaaacctcattgtgcggcctccttactgtatttctcccacagcggcttgatctcttcttcccagacgcgaggattcagatcgcccgcatggcgatagcgaatgatgccgttgccgtcaataagaaacgtttctggcgcgccatagacaccgagatccagccctaacatgccatcgccatcaaacaggcttagcgcgtaaggattgcccagctctttcagccagctgattgccttctggcgatcgtctttatagttcatgccgaccacgcggatgccctgcgcagaaagctgattcagatattgatgttccgcacggcaggtcggacaccaggtcgcccagacgttaagcagtactggtttgccctgagtcagcacatccgcctgataaaactgccccggattgtccagactttcgagacgaaacttcggcacaggcttgccaatgagcgcgctttccagattggtcggatcatccccttcggcattacgcgccagctgccacagcagcgccgcggcaatcgccaggaagataatcaacggaattaacaatactttgcgcttcatacggcctccggcgcagttttttgcggactcacgcgcttacgatagcgaggatcaaacagacacagcagtccgcccaacgccatcatcagcccgcccgcccaaatccagcgaacaaatggtttgtagtaaagacgcacggcccacgcgccgttttccagctcttcaccgagggccgcgtacaggtcacgcgtgatgccgccgtcaattgccgcttcggtcatcatgctcccggcagtgttgtaataacgtttttccgcatacagcaccgtttccggcttgccatcgcgcgttacgccgatagtcgccacaccgccacgccagttcgggccagtcacctctttgacatcacggaaggtgaagcgatattcatgaatatcgacgctatcgccggacttcatgcgcacatcacgctcaacgctatagttctggctaaaggcaatgccaacaattgtcactgccagcccaaggtgagccgccaccatcccccaataactgaaggtggttttcgtgccgcgactaatacgtagcgcagcttccgcaattgccagcaccgcaatccagcaggccattgccaggccgagcaccgtcatcgccacaactttgctttcgaacagccacggcaacagcaggctcagcaccagcgtagagatgaaggcgataatcaataaattgcggatcttacgcgggcgatcccgcccccagcgcaccagaggaccgacaccaagcagtagcgcaaacggcaccatcagccaggtaaacatggtgttgaagaacggttcgccaatgctaatactgcccagtcccagttgcttatgcaccaacggcagcagcgtccccagcaacaccaccagcatcgcagcgaccagcaaaacattgttcgctaacagcaaagattcccggctccacagcgcattgtttacgcgactgcgaactttgtgtccacgcgcggcaaacagcagcaggctaccgccaatcaccagcaccataaaggcgaggataaacataccgcgcgccggatcagacgcaaacgcgtgtacgcttaccagcacgccggaacgcacgaggaaagtccccaacagacacaagctgaaggcactgattgccagcagtaatgtccacgctttgaagctggcgcgttgttcagtgaccgccagactgtgcatcagcgcagtccccaccagccacggcataaagctggcgttttctaccggatcccagaaccaccagccaccccagccgagttcgtaataggcccatgcggaaccgagcacgatgccgagcgtcaggaagatccacgctgccagcgtccacggacgagtaaaacgcgcataagtgctgtccagacgcccgctcagcaaagaagcaatggcaaaagcaaacgccacgctgaaacccacgtaccccatataaagcagaggcggatggaagatcagccccggatcctgcaatagcgggttaagatcgcgaccttcaatcgggaagttcggcaacgtgcgagagaacgggttagaggtaaagagaatgaacagcaaaaagccgacactgaccatccccattatcgccagtacacgggccacaatatccagcggaatacgctgactaaaaatcgccaccgcaaaggtccagccgctcatcagcagcacccacagcagtaggctgccttcatgcgcgccccaggtagccgccacgcgataccacaccggaagctgggtattggagttgctggcaacataggtgacggtgaagtcgttgaccacgaaagcattgaccagcaccagaaatgcgccagccacagacataaacagcagccaggcaaacaagcgggaagacgccatcatgcgcgcatctccgcgcgccacgccccatagcggatacacggacagcagcagcgcaattcccagcgccaggcacagcagtccgttaccaatttctggcatcatgatgctgggtccttataaacttacgtcaacttgctgggtccttataaacactcgccgggcgacggtggttagcttccatcgctttctcaacttctggcggcgtatagttttcatcgtgtttcgccagcacttctttcgcgaggatatgattgcctttttccagttcgccctgcaccacaacgccctgcccttcacggaacagatccggcaaaatgccttcgtaagagacatccacactgccttcagcatcgtaaatggtgaaggtcactttcaggctattgggatcgcgctgcacactacccggcatcaccatcccgccaacgcgcagacgctgaccgacttccggcatttgctgagtttcacgcttgccgtagagaatttcccccggcgtataaaagagatcgatattgctgcgcagcgcatatagcaccagaccgatagtcagcgccagccctgccaacacggcacaggcaatccacaagcggtttttacggcgaatattcatgcagcctcctgctgttgcgcagcacgtaaacgcgcctcacgcgcccgctgttgcgccacgccacgcagaattgcgcgatgttgcatcacgctgtgcacgaccaaaaccaccagcggaataacggtcatcaccaccgccagccagacaaaaaaggcgtaaccgcccattgcgaaaaattcattccaggaagcaaatgcaggggtcatttacggcctcttttcagtatcagttcactcacccacggacggcgtttttccatcagcaaaatcaaattacgcatccgcatcagcgtcagcgtggcagacaggagcaggaagccaaaaatgctccagcgcagcgggctacgcatcgccggatcgatactttgctgcatccgcgtacttccctgatgcagggtgttccaccactccacggagtaatgaataatcggcagattcaccacgccaatcagcaccaggatacctgccgcacggcccgccagacggcggtcgtcgaaggcgtgccacagggcaatcacacccacatacaaaaacagcagcaccagttcagaagtcagacgtgcatcccatacccaccaggtgccccacatcggttttccccatgcagagccggtaaccagggcaataaaggtaaacacggcaccaatgggggccatcgccgccaccgccaggttggccattttcatctgccagacaaggccaataaacgctgccactgccatacttgcataaatgcccatgctccagatcgccgcaggcacatgcaggtagataatgcggtagctatttccctgctgataatcagccggagcaaagccgaatccccagatccagccgacggtaagcacgaccacactggcaattgccagccacggtataaaccagccacagatttgatacagccgtggtgggatcgccagttgatgcagtgttttccacatagtttcgataccagactcgaacaaaaatcagtaatccagcgttattgaatgctgattcgtaacgctgccgccgtcgcaaaaggacttaatgtcgcggtgcctgccagcaacgcgcctaaaattgccagatacccgtcaacgggcaaatgcatagaagccgcgtccatcgcggcggtggcaaagatgagtaatgggatagtcagcggtaacaccagtatgctgagcagcacaccaccgcgcttaagtcccactgtcagcgccacgcccggtgcaccgagaaagccaagcgtaggcgttcccagcagcagcgtcagcgccatcacttgccagccataaacatccattcccagtagcattgctaccagtgggctaaggatgagtaacggcagaccggttaccatccagtgcgccatcaccttcgccagcacaacggcgggcaagggtaacggcaacaacatcaattgttcaagactgccgtcctgcaaatcgtcacggaacagtcgttccagcgccagcaaggaactaagcagcgcagcaacccagataatgcccggtgcaatacgcgccagcagttgcggctccggaccgatactgagcggaaaaagggtaattacaatcaggaagaaccacagcgggttggcgatttcggcgctatggcgaaacgctacacgcagctcaagacggaaaatgcgccagaacatcatgcggccctcgtttgcgtcagactaatgcggcgaattttactttcagcaacgttgagcggctggtgggtagtcagaatcacaatccccccctgctccgtatgctgcgccatacgctgggtcagacgatcgacaccgttaacgtcaatcgcggtaaaaggctcgtcgaggatccataacgtggcacgggtcagccacagacgcgctaaagcgacgcggcgttgttgcccggcgctgagctgatttacaggaatatcttcgaatccggcaagcccggcctgcgccagggcttccagacattgtgcggtatcgccatcgcgatgataaaagtgcagattttctaacgccgtcagccgggttttgatccccggctgatggcctatccataacaggttttgatggtagctgtcgcgtacctgatgcaagggctgcccttgccagagaacctcgcctgcgtcagggcgagacaaccccgtcagcaaacggagaagcgttgtcttccccgcgccgttgctaccggtgatttgtacccactctcctgcgttcagcgtaaaactcaagccactaaataaggttcgttcatcccgctcacaaagtaactctctggcttcaagcatacccacgcaataaccctgttaaaaacctggctcgacttcacgcatatcgggcagcttgtgcgctatccctttatggcaatcaatacaggtttgcccatctttcaccgcctggtcatgcatcttcgcggcaacgcttttctgggcggttgtatccatatactcgaagttgtgacagttacggcactcctggctgttattgtccttcatgcgccgccactcattctgtgccatcgtcagacgatgagcttcaaatttctgcggcgtgtcaataacgccaaaaattttaccatacagctctttacttgctttgagcttgcgtatcatcttcggcacaaactcgtgcggaacgtgacaatccggacaggtcgcacggacgccgctacggttgttgtagtgcacggaatccatgtattcctgatacaccgtgttgcgcatttcgtggcagctaatgcagaactcttcggtattggctttttccatcccggtgttaaagccaccccagaagacgatgccgccaacaaaaccgatcaacagcagcgtccccagcgccagacggctgggggtacgccaccatttccacaggcgcttaatcagaccaggcttacggtcagaatttcccataataacctcttatttcccgtaacctttacttggggtaaaggtattccccacgattggcgcggtatcggcctgcggtacgtgacattgcagacagaaataacgacgcggagccacttccgcgcccactttgccgtcgctgtccataaagtgagtaggactgatacgcggcgcgccagtggtgcgatagctttcgacaccgtggcactgcaagcagcgattggtattggtcgttacctgataaccttcaacgctatgcgggatcattggcggctgattcacatagttcagcggcatccgatcctgctcttttggcatccgaatggccccttcctgtgtcccggatacttccgggctctggctaaaatcgacgccattagccgcccaaaccgcgccgcttaccaccagggccagcatcgccgtccattgacacagcgctttcttcaggtcatggcttttcatgatttcgctcccgaactccattatgtcaacttttcgctccgctactccatcgtgtagttattgtaaatacatcctcagaacagacatccacgcagcgaccgcacgtcatgcaatcgcggctggtgacctgcaccgggctttgttcatccagcaccggggcacgtagcacatgcggttccgggcaaacatgaaaacaatccatacagcggttacatttctgccgatcggtggccgcaacggtaatcacacctttgctacccagcacgccatacagcgcgccaaccggacaaatgtgcccgcaccagccgtgttcaacgaccagtagatcaaataaaaacagcgcgagaataagcagcgcgccgctgccgaagcccattaccaggctacgccccatcagagaaacggggttgatccattcccaaatgagcgtgccagttaaggcacttcccaccagaatgaccaccaacagcacgtagcgaatgtggcgagggatcgtcgcagactgattgaggtcaaagcgcctgcgtaaccagttcgctaagtcggtaatcgggttcagcgggcagacccagctgcaaaataatcgctttcccgccagggcgtagagcacggtgataatcaccgcaccggtcaacgccaccgtggcaggcagatgaccactggcaagactttgcagcgtcatcagcggatcggtcagcggaacggtgtcgaataacaggctactgctgtagttgccgtgcaagatccacacaccaaaccatggaccgctcaaaaacatccccagcacgaagaactgacaaaggcgacgtaacaccagccaacggtgactgcgccaccagccttttttctccagcgcctcgcgcccggcgtcacgtttacgatttgccattgttcccctccagccagccgttacttagcttttgccattgttcccctccagccagccgaagcggtaatggtgacctaactcccctttcgccagactcagcggtaacaccttgattgccggttgttccagcacgcatactttttcgcacttaccgcaaccggtacaggcgtcgctgtgaaccgtcggcagaaagcgggcgtgcttaccggtacgcgtgttgcgctccagctccagggtgatggcctcatcaattttcgggcattcgcgataacaaacatcgcagcgcagcccctgaaagttgagacagttttcctggtccaccagtaccgccagccccatccgcgcgtcgtcgatgctttcaatctcacgatccagcgcaccgcttgggcacactttggcgcacggaatgtcctcacacatttcgcaaggaatatcccgtgcgacaaaatatggcgtgcccgcgctcagaccagaggccagcgtcgccagttttaaggtgtcgtaagggcaagcctgaacacactgaccgcaacgcacacaggcactggcaaaggcgttctcgtttatggctccgggcgggcgcaaccgcacgccagatgcgcgtgcggtttgctgttgtaaccccagcgccacacccacggcagccagcccgcctgctgtgcgaacgacatcgcgcagaaagcggcggcgaccattttgaggtttcgcactccgggacataatggcttacaccttctccagtttgaccgcgcacttcttgaagtccgtctctttgctgagcggatcggtcgcatccagcgtcagtttgttaaccaactgtgcggcgtcgaagaacggcatgtacaccaggccctgtggcggacggttacgaccgcgcgtttcaacaatgctgatcacttcgccacggcgagaaaccactttcactttgtcgccacggcgcagatcgcgcgctttcgcatccagcgggtgaataaacaggaccgcttccgggaaggcgcggtgcagttctggtacacggcgagtcatactgccggtgtgccagtgctccagaacgcgtccggtagagagccacaggtcgtactcttcatccggtgcttccgccgccggttcgaatggcagtgcgaagatcaccgctttgccatccggtttaccgtagaacttatagccttcgcccgctttcacgtacgggtcgttaccttcgctgtaacgccactgcgtttctttaccgttcaccaccggccagcgcagaccgcgcgctttgtggtagtcatcgaacggtgccagatcgtgaccgtgaccgcgaccaaaccatgcgtactcttcgaacagccctttttgcagatagaagcccagctcgcgggattcatcgttcagctgatcttccgccagttcggataccgggaatttgctcacttccggtgtggcatacagcacttcgtacagcgttttgccacgcagttccggtttcttcgccagcagatcttccggccatacttcttcagttttgaagcggcgggagaactggactaactgccagagatcgcttttcgcttcgcccggtgcctgtacctgttgacgccagaactgagtacggcgttcggcgttaccgtaagcgccctctttctctacccacattgcggtcggcaggatcaagtcggcggccagcgcactgactgtcggatacggatcggagacgatgatgaagttgcgcggatcgcgccagcccggcatacgctcttcattgatgttcggcccggcctgcatgttgttggtacacatggtccagtaaacattcagtttgccgtctttcagcgcacggtcttgtgccaccgcgtgcagaccgattttcgccggaatggtgccgctcgggatattccacttcttctcgcagatatcacggtgtttctcgttggtcaccaccatgtccgcaggcagacggtgagcaaaggtgcccacttcacgcgcagtaccacacgcagaaggttgcccggtcagggagaacggaccgcaacccggctgggaaattttgccggtcagcaggtgcaggttgtagaccaggttgttagcccacacgccacgagtatgctggttgaagcccatcgtccagtaggagatgactttcttgttcggatcggcatacagctgcgccagttgttctaactggtctttcggcacgccggtcatttcggcagttttttccagcgtatactcggcaacgaaggctttgtaatcttcaaagctcatcggttcggaggcgtcagaacccggattcttcgctgctttttccagcggatgggtcggacgtaaaccgtagccgatgtccgtcgcccctttgcgcaggttaacgtgcttgctgaagaagtcctgatttatcgcattgttttgaatgatatagttggcgatgtagttcaggatcaccaggtcagattgcggcgtaaagatgatgccgttatccgccagctcgaagctacgatgctggtaggtagaaagcaccgccacggtgacgttctggttagagagacgacggttagtgatgcggctccagaggatcgggtgcatttccgccatgtttgcgccccacagcacaaacgcgtcagcctgctcgatgtcgtcatagcagcccatcggctcatccataccaaaggtacgcataaagccaactactgcgctcgccatacagtgacgcgcgttcgggtcgatgttgttgctacggaagcccgctttaaacagcttggacgcggcataaccttcccagatagtccactgaccagaaccgaacataccgatgctttccggccctttttctttcagggcggttttgaatttctcttccatcacatcgaaggcctgatcccaggtgattggggtaaattcgccttctttgtcatatttaccgtttttcatacgcagcagcggctgcgtcaaacggtctttaccgtacatgattttgggcaggaaatagcccttaatgcagttcaggccacggttaaccggtgcgtccgggtcgccctgacaggccaccacacgtccctgctgcgttccgaccagaacgccgcaaccagtaccgcagaaacggcacggcgctttatcccatttgatggcttcctgctgaccaacaacggcgcgggcaacgcccggcacgctgagaccggcagccgccgcagcggccgcaacggcgttagctttcataaagctacgacgactgagtttcatggtgtttcctcaccttgctcttcctgctggtgataaaccaggctcaccgccagcacgccctctacgttgcgtacactctcaatggtttggatcagcgtttcgctgtcttctgcttccaccaccacaatcaactgaccgctcggcgcgtcgctgacagcaacttcacagccgggaaaggcgttcagttgggtgctgatgtcactaattcgttcgcttttggcctgcacgaccaggctgcaaacttgccagttagtgtgcatggagatactccgcagttatggcacttaccggacagctggctgcacatgctccacatccgttgcaaagttggctattaagttgcggctggtagatcccggagagcgtcgggcgaaagataattgccattggctcacagctatcctgacagcggcggcattcaacactctgatacgccaggcacgcgtccccgatggtgaactgcaaatcccaggccctggtgtggcgcggagaaaataggctttcggggcaagcctgcgcgcaggcgtaacagaagctgcactcgttatttttgaaattaacgctcggatagccgcccgcgccgcgttgcagaatgttgttttcacaagcattaatacaggcgtcgcagcgggtgcaatgggtcagaaaatgagattcatcaccggaccagggcggacggataccgttactggctttgcgccagcgaccagtgagtatgccccgacgggatgcatcaatcttcacattgaccttccatcattaacgcgctctgaaaattgagagcgaccaaataaaccgcataattaataagccatttttatagccgctaagatattaaaggatgtgtcaaagatgcataccccgatcggggtaaaacctgtagcaggatcaaaagagtggcgggaagcgtggcaaaaacgggcttttgctcacatttcaaatggttataaatatatttatatagcgattgattcaccagagatatttctgctggtttgctctctcattagaatttaacactaaaagagcaggtaaaattgtctgaatgttctttaagttattcataaagcaaattaataaatctgatgaatatgttaaccttcagcgacatcatcggtgaaaacctataaatgaagaaggaaagcaaaaaaatgaagaccattctacctgcagtattgtttgccgctttcgctaccacttccgcctgggcggcagaaagcgtccagccactggaaaaaatcgcgccttatccacaagctgaaaaagggatgaagcgtcaggtgattcagttaaccccgcaagaagatgaatctaccctgaaagtagaactgttaatcggtcagacgctggaagtcgattgcaatttgcatcgtctcggcgggaagctggaaaacaaaacgctggaaggctggggctatgattattatgtctttgataaagtcagttccccggttagtacgatgatggcctgcccggatggcaagaaagagaagaaatttgtcaccgcgtatctgggcgatgctggaatgctgcgttacaacagcaagctgccgatcgtggtgtatacgccagacaatgtagatgtgaagtaccgcgtctggaaggcggaagagaaaattgacaacgcggtagttcgctaaactgccgtgaagtgcggcaccccgtaggtcagacaaggcggtcacgccgcatccgacatccaacgcccgagccggttgcctgatgcgacgctggcgcgtcttatcaggcctacaccgctgtgaagtgcggcaccccgtaggtcagacaaggcggtcacgccgcatccgacatccaacgcccgagccggttgcctgatgcgacgctggcgcgtcttatcaggcctacaccgctgtgaagtgctccaccccgtaggtcggataaggcggttacgccgcatccgacatctaacgcccaagccggttgcctgatgcgacgctggcgcgtcttatcaggcctacaccgctgtgaagtgctccaccccgtaggttggataaggcggttacgccgcatccgacatccaacgtccgagccggttgcctgatgcgacgctggcgcgtcttatcaggcctacaccgctgtgaagtgctccaccccgtaggtcggataaggcggttacgccgcatccgacatctaacgcccaagccggttgcctgatgcgacgctggcgcgtcttatcaggcctacaccgctgtgaagtgctccaccccgtaggttggataaggcggttacgccgcatccaacatctaacgcccgagccggttgcctgatgcgacgctggcgcgtcttatcagcatacgccacatccggcataccatgccggatgtggcgtatcattacaacgcaatatccgccacttctttttgaacgggttgcggtttcaactgcggtttcggcgtactatctgctgcctgcggcttgtcgtagttcaaccccagcacttcgctggtgtactgcaactcgcgttctgttgccgctacatcaccgttcagcttgcgtccataagacggaacgatcgctttcaacgtagcctgccattgcgggctggaaacacgatcgccaaatactttttccagcagattcaacataatcggcgcggcggtactcgcccctgggcttgcccccaggagcgcggcaatggttccttgctggtcactgacgacttcagtacccagacgcagtacgccacctttctcggcatcacgcttgataatctgcacgcgctgccccgcttgccacaaacgccagtcctcttttttcgcctgcggatagtactctttcaacgcttcaaaacgatcctcttcactcaacatcacctgactcaccagatatttcaccagatcgaaattatccagcccgacgtgcatcatcggcatcacgttagaggtggtggtggaactcattagatcccacaaactaccgtttttgaggaatttggtactgaaggtggcaaatggcccaaacagcactacgcgtttaccgtccagaacgcgggtatcgatatgcggaacgctcatcggtggtgcgccaacggatgctttaccgtaaaccttcgccagatggtgattaaccacgtccgggttttcgctaacaaggaactgtccgcccaccgggaaaccggcgtagtctttcgcttccggaatcccgctttcctgtaacagcttcagcgccgcaccgcccgcgccgataaagacaaatttggcacgaatgttctgtgcagtgccatttttcagatcggcaacggtaacggtccaggtgttatcgtcattacgctttagggcgcggacttcgctgctgagttgcaggctgaagttagatttcttctgcaaggaagcaattaactggcgggtgatctcgccgtagttcacatcggtaccaatttccgtacgcgtggctgccactttctgttgcggatcgcgcccttccatcactaacggtgcccactctttgatctgcgcgtgatcttcagagtaacgcataccgcgaaacaggctgctttgttgcaacgcggcgtaacgggcgcgcaggaaattgacgttatcctcgccccagacaaagctcatatgcggaacggtattgataaaactacgcggagtacgcagcacgccgcgctcaacctggtgcgcccagaactggcgggaaatctgaaatgcttcgttaatggcgactgctttttcaatactgatgctgccatcggcgttttgcggggtgtagttcagttccatcagtgcagaatgcccggttccggcgttattccagccgttgctactctcctgcgcgacaccctccaggcgctccaccatggtcatgctccattcaggctccagctcgcgtaaataggtccccaacgtggcgctcataatgccgccgccaatcaacagtacatcagtttcctgctcctcggacgctttcgcttttgccgccatgctaacggcattaagccccacggccatgctgaagagcatggcagtcacttttttcatcttgttaatgccttacttttagtcgctttattgcaggtgagatttgcgcggcatcaacggtaacacttaagtaacaacatttaaataatgtttataaattatattctaattttagaaacattataatttcgttgattaattatagggttattagaaatgaagggatttttagcatattgacctgacggcagcagtccgccaggtcagcgtcgtaatattatgccgtccgggcaacggcatcacggctagcggcatcgcgctcttcgcccgtcagctcgctaagttgcccattgcgcatttccagcaggcggtcggcgtggataaagtaatgatcatcatgactgatagcgaaaatagttttacccatctcctgcatcagcggcagcaacacctgataaaactcacgacggaagtgtggatcctgatccgccgcccattcatccagcaggataatatcgcgttcttctgccagcgccagcaacagcgccacgcgttttttctgccctttacttaacttcaggttaacaatacgcccgttgcttaactcaagcttatgagccattttcagctgcgccagccacttctcaaccagttgcgggttagcgggtttaccctccggccccagcagttgatcaaacagccagacatcggtaaacactgcgctaaacagtttgcgataatcttccggttgttcgccgctgacaggtttgccatccagcaagatttcgccgctttgtggctgatacaagcccgtcaacaacatcgccagcgtgctttttccgctaccgttgccgccaatcagaaacagcagctcgccacgtttgatggtgagattaatcggaccaacggaaaacgcgttatcctgataagcaaacgtcacgttacgcagctccagcgtttgccagttgggaaacgcctgcgggcgcggaaactctgctttgaaaggcgcgagcgcgaatttgttcagcttgttaaacgccacctgcgccgtcagcagcgtcggcaatgcgccaaccgcgctaagcagcggcgtacgcaggaataaaagcgtcaagctataggtcgcggcaacgttggtatcagcccaaccgaggctgttcgccatccagaacaccaggccgattgcgcccagcatcatgatgttactccagttcacggcactaagatggaaggtgtctgcgcgaataatatggtggcgatactcttgcgcatcaggaatgtagaggttgttaaacacatactcggcgcgttcccggttcagagtcagctctttgcgcccttcaagtacagtttgaaaatccgtgtacagcttgtcttcggtttcacgcagggtcgccatatgtttgtacacccgcgccaccagcacaaaaccgccccagatggtgatcgccatccagatagccgttaccagcaacattttgccgctcagcatccacagatacgccgcactaccgatagtgagaatgatcccctgcaccagttccggcagacgcacaaaagcaatggtgatattgcgcacatcgctggttaaccccgccagcaagctggcgctaccgagttgttcaatgcgctcgacgtgagtatccagaatccgcttgataaattcactacgcagtcggtaaacgaagtgatgccccaaagtggtgagcgccagttggcttccgagagtgactgccatcaacagcagcaataatcccagaaactccggcaacaccagcagactggtatccgccgtttcgataaggcgctgattgataaaagcaattaagccaatgcctaatgccgcactggcgaggcttagcgccatcacactgataaatggccagcgatactgccgccagacaagtacaagaagttccatgcagaaaacccggacaatgaattacagcccgcagtttaaacatcttcgcgcgcacagcaataataattcttatttttattcttttttacctgcctgacggaatgtcaggttgtagcggcagtcgatggtgagtggatgaaaccccgctttcaacggttgaataccgtgataaaacagccggctttcaccgccccataccaccacatcgccatgttccaacaacaaacgtttgagcggatcatttcgtttcaggccgccaaattgaaaaatcgcgggtaagcccagagaaacagaaacaattggcgcgcgcagatccggttcgtctttatcctgatgcaggctcagtttcgcgccaggagcgtagcggttgataagacaagcatctggctggaaatctggatagcccgccgccgtagccgcacgttgacataaattatgaaaactctgtggcatggcgggccacggtttatttgtttgcggatcaatggggctatagagataaccttgccgatgggtcgtccagcccagatgcccacagttggtcatcgccacgctcatggtatatcccccgggggtgaccatctggcgaaacgggctctggctggcaacgtcattaatatcgcggatcagttgctccgcagcgttaaaagcaaaacgccgtaaaattaccgcaccagccgccagtggctcttgccacggttcagcatcggcaaacagatccaacattacctctcctcattttcagcttcgcggcgcagcagttgcgctttacggctcacgccccagcggtaaccggaaagtgtgccatcaccacggaccacccgatgacagggtattatgatagccagcttgttggcggcacaggcgctggcaacggcccgtaccgctttcggtttgccgatggcgttagccagttgctgataactgacggtttcaccgcaaggtatcgtgcgcagtgcctgccagacttgttgctgaaaagcagtgccgcgaatgtccagcggtaacgtcagcggcgtatcgcgttgattgaggctggcgatcacttcacgcacatgttgctgaaacatcagatcggcaggcgcgttgtcggcagcgggaaacatctgctgcaactcgctgattagtgtcgcgtcatcatcgcccagcaatatcgcgcaaatcccccgctcgctttctgccaccaggcaacgacccagctcacaatcagccagcgcgtaacgcaccgccagattttcgccaccgtgacggaattgtttagccgtcatgcccagcgtttcgtcagctttgcgatagtaactgctgctgtcggggaatccggcgttaagaatagacgtcgtcacgctctcccctttcgccaggctttcgcgcaaacggcgagcgcgccaggcctgttgccaggctttaggcgtcattccggtagtcgctttaaacaaccgatgtagatgaaatggactcatcgccacctggtcggctaaggcttccagcgttacaggcgtttcctgttccagcagtcgacacgcgtgggtgattttatccaaccgatgttgctgggcattggctttttctggctgacaacgtttgcaggggcgaaagccagcggcgagtgcctcgctggcatttgcgtagaaggagacgttttcccgcaaagcatgtctggcgcggcaagacggacggcaaaagatgcctgtggtacgcacggcgaaaacgaattcgccgtcggcattcgggtcgcgggctaagacagattgccagcgttgatcgtcagttaagcatgtggcttttttcataatcagctccctggttaaggatagcctttaggctgcccggtcaccatcacgcaaaaaccaacaatcttgcgctttaatttttttcgctgacaaggaagcttttaaactgtggactcatccaggttttaaagctatcgccttctttggtgatcatataaaccgccagcccttcccggcgaacaacctctttagctttctccggcccgagtaccatcaagccagtatcccaggcatcggcttccagcgccgtcggagcaatcaccgtcacggataccagattgtgttcgatgggacgcccggtttgcggatcgataacatgggaaagacgtttgccgtccagttcgtaatagttacggtagctgccagaggtgctaatcccatgaccgttgatatccaccacagcctgaaccgcgttttctttatcggttggtttttgaatcgctacccgccacggcaggccttcaccgttcataccacggctgttcagcgcgccgcccacgctcaccagatagcgggaaatcccttcctgctccatcaagcgtgccaaatgatcggccgcatagccttcgccgacggtggagagatcgacatataaatccggcaggtctttttgcagatattgctgatggctctgattgatgaccgtcaggtgctgtaagccggttttggctttcatcgcatcgatctgttcctggctcggaatttgaaccggctgttgttccgggccaaagccccacagattcaccagcggcccgacggttatatccatcgcgccatcggtcttcgcgccaatgcgcaggctggtggtgacgatatcggccatcgcttcacttaccggccacgggcttaaactttggctgtcgttaaagcgcatcagcgcggaatcttttttataggtgctaagcagctgatcgtcggcgtccagttgggtctgaatcttttctttaagttcggcgctgcgtttggcgtcaatgcccgggatgctggcacgccagaaggtacccatagttttgccttcaagaacggtaacttcagtagcgtgggttttggcgggttgtggtttttgatcgcaaccaacaaagaagagcgcggcagccagcagtgccacgcgggtaaagcttatttccatacgtgattatcctcatgcgaacggtcgcaagagtacaccaaaaaactgagtttgtacgctgaaaacaatgaaaaaagggcccgcaggccctttgttcgatatcaatcgagattagaactggtaaaccagacccagagctacgatgttatcagtgttgatgccagcgtcacgagtgaactggttgtcgtccagcaggttgattttgtagtcaacgtaggtggacatgtttttgttgaagtagtaggtagcaccaacatcaacatatttcaggatatcttcgtcgtcgtagccacgacccaggtttttacctttagactgcaggtaagccagggacggacgcagaccgaagtcgaactggtactgagcaacagcttcgaagttctgtgctttgttcgcccaacccagggaacctacgcgagttgcgttgtaggtctgggtgtactgagcagccaggtagatgttgttagcgtcgtatttcagaccaccagtgtaggtttcagcacggtcgccgttaccgatgtaagcagcggtgttctgagcatcagtacgtttggagctggagatcgcaccaccgataccgaaaccttcgtaatcataagtgatagaaccgccgacgccgtcgccgttttgacgcagtgcgtcacgaccgttgttagttacgccactagtaaagccttcaccagatgggttgccgtttttaccctggtactgaacagcaaagttcaggccgtcaaccagaccgaagaagtcagtgttacggtaggtcgcgaagccgttaccacgctgctgcatgaagttgtcagaaccgtaggtgtcaccaccgaattctggcagtacgtcggtccaggaagttacgtcataaacaacgccgtagttacgaccgtagtcgaaagaacccacatcctggaatttcagacctgcgaatgccacacgggtccaggagttgttttcgttttcagcgctgttgccctggatctgatattcccactggccgtaaccggtcagctggtcagtaacctgagtttcacctttgaagccaagacgcatgtaggtctggtcgccatctacatctttgttgtcagagaaatagtgcaggccgtctactttaccgtacagatctaatttgttgccgtctttgttgtaaacttcagcagcgtttgctgcgcctgctaccagcagagctgggaccaggagggacagtactttaactttcatgttattaaccctctgttatatgcctttatttgcttttttatgccactgcatactgattaaccctcattaatcagtcggcaagtccattctccccaaaaatgcagaataatccaacacgaatatgatactaaaacttttaagatgtttcatttatcgctatagatgtttcaaaatgtaaatgcaagggaactttttaagattattgcggaatggcgaaataagcacctaacatcaagcaataataattcaaggttaaaatcaataacttattcttaagtatttgacagcactgaatgtcaaaacaaaaccttcactcgcaactagaataactcccgctatcatcattaactttatttattaccgtcattcatttctgaatgtctgtttacccctatttcaaccggatgcctcgcattcggttttttttacccttctttacacacttttcattattctgtgctaccacagaaaaactataacgcttgttaactatttcacaaataattaacatccgcataatttccagcaatctttgtttatttgcaattatttttgttgggctttttgtaggttatttgtacagcaaaatggcgcttgtacatctatttcccccaatgcaggatgataaatatcacgggagaatagagaatcatcaatcaggtaagagtctggaatttcacactgtaccctttatactgccctatcacttcgcgaagttttaacaggtcataaacacgaatgcgtcagaaagagacaacggccacgacccgctttagtctcctaccggggagcattacccgcttctttttactgttgatcattgtgttactggtgacgatgggtgtaatggtacaaagcgccgttaacgcctggctgaaagataaaagttaccagattgtcgacattacccatgctatccaaaagcgcgtcgataactggcgttacgtgacctggcagatctacgacaacattgccgcgacgacctccccctcctccggcgaaggtttacaagagacgcgcctgaaacaggatgtctactatctggagaaaccacgccgcaaaacggaagcgttaatctttggctctcacgacaacagtacgcttgagatgactcagcggatgtccacttatctggatacattgtggggcgcagaaaatgtaccgtggagcatgtattacctgaatggtcaggataacagtctggtgctgatcagtaccctaccccttaaagatctcacctccggatttaaagaaagcaccgtcagcgacattgttgatagtcgtcgtgcagagatgttgcaacaggccaacgccctcgatgaacgcgaaagcttttctaacatgcgccgcctggcctggcagaacggtcattactttacattgcgtactacctttaaccagccaggacatctggcaacggtcgtggcttttgatctgccgattaatgatttgatcccaccgggtatgccgctggacagtttccgccttgagccagacgcgacggcaacgggaaacaatgataatgagaaagaagggacggatagcgtcagtatccactttaacagtacgaagattgaaatctccagcgcactcaactctaccgatatgcgcctggtctggcaggttccttatggcaccttattgctggatacgttgcaaaacattctgctgccactgctgctgaacatcggtttgctggcgctggcgttatttggctataccacattccgccatttctccagccgcagtacagaaaacgtccccagcacggcggtcaataacgaattgcgcattttacgggcaatcaatgaagagatagtcagtctgctgccgctcggcctgctggttcacgatcaggaaagcaaccgcactgtcataagtaacaaaattgccgatcatttgctgccgcatttgaatctgcaaaacatcaccaccatggcggaacagcatcaggggattattcaggcgacgatcaataacgagctgtatgagatccgcatgttccgcagccaggtcgcgccgcgcacacaaattttcattattcgcgatcaggatcgcgaagtgctggtaaacaagaaactcaagcaggcgcagcgtctgtatgagaaaaaccagcaggggcggatgatctttatgaaaaacattggcgatgcgctgaaagaacccgcacagtccctggcggagagcgcggctaaactcaacgccccggaaagcaaacaactggcgaatcaggcagatgtgctggtgcggctggttgatgaaatacagttagcgaacatgcttgcggatgatagctggaaaagtgagacggtgctgttctccgtgcaggatttaattgatgaagttgtgcctagtgtgttgcctgccatcaagcgtaaaggtctgcaactgctgattaacaatcatctgaaagcacacgatatgcgccgcggcgatcgcgatgccttacgacgtattttgctgctactgatgcaatatgccgtgaccagtacgcaattgggaaaaatcacccttgaggttgatcaggatgagtcctccgaagaccgcctgacgttccgcattctggacacgggagaaggcgtaagtattcatgaaatggataatttgcacttcccgtttatcaaccagacccaaaacgatcgctatggcaaggcggacccgctggcattctggctgagcgatcaactggcacgtaaactgggcggtcatttaaacatcaaaacgcgggatgggcttggtacacgctactctgtgcatatcaaaatgctcgcagctgacccggaagttgaagaggaagaagagcgtttactggatgatgtctgcgtaatggtggatgttactagcgcagaaattcggaatattgtcactcgccagttagaaaattggggtgcaacctgtatcacacccgatgaaagattaattagtcaagattatgatatctttttaacggataatccgtctaatcttactgcctctggcttgcttttaagcgatgatgagtctggcgtacgggaaattgggcctggtcaattgtgcgtcaacttcaatatgagcaacgctatgcaggaagcggtcttacaattaattgaagtgcaactggcgcaggaagaggtgacagaaagccctctgggcggagatgaaaatgcgcaactccatgccagcggctattatgcgctctttgtagacacagtaccggatgatgttaagaggctgtatactgaagcagcaaccagtgactttgctgcgttagcccaaacggctcatcgtcttaaaggcgtatttgccatgctaaatctggtacccggcaagcagttatgtgaaacgctggaacatctgattcgtgagaaggatgttccaggaatagaaaaatacatcagcgacattgacagttatgtcaagagcttgctgtaacaaggtagcctattacatgaacaatatgaacgtaattattgccgatgaccatccgatagtcttgttcggtattcgcaaaagtcttgagcaaattgagtgggtgaatgttgtcggcgaatttgaagactctacagcactgatcaacaacctgccgaaactggatgcgcatgtgttgattaccgatctctccatgcctggcgataagtacggcgatggcattaccttaatcaagtacatcaagcgccatttcccaagcctgagcatcattgttctgactatgaacaacaacccggcgattcttagtgcggtattggatctggatatcgaagggatcgtgctgaaacaaggtgcaccgaccgatctgccgaaagctctcgccgcgctgcagaaagggaagaaatttaccccggaaagcgtttctcgcctgttggaaaaaatcagtgctggtggttacggtgacaagcgtctcagcccaaaagagagtgaagttctgcgcctgtttgcggaaggcttcctggtgaccgagatcgctaaaaagctgaaccgcagtattaaaaccatcagtagccagaagaaatctgcgatgatgaagctgggtgtcgagaacgatatcgccctgctgaattatctctctagtgtgaccttaagtccggcagataaagactaatcacctgtaggccagataagacgcgttagtgtcttatctggcatttgcaccgattgccggatgcggcgtaaacgccttatccggcctacgattcccattatttcaacaaattacattaaagtaggccagataagacgcgtcagcgtcgcatctggcatttgcactgaatgccggatgcggcgtaaacgccttatccgtcttagctatcccggcttttcctgaccctctcggcatataacgtcagcgtctgttttatcacatccagcgttaccggcttgctcaggcagctgtccataccggactccagacaccgctgcttctcttcagccaacgcattagcagttactccgattaccggcaacgtcagtcccaactgacgaatgcgttgcgtcaagcggtaaccatccatatttggcatgttgacgtcgctaagcacgatatcaatatgattcttgctaagtacattaagcgcatcgacgccatcattcgcggttttacattgatagcccaagcttcccaactgatctgccagcaaacgccggttaatcggatgatcatccacgaccagaatcatcatatcgtcattatcgctgaccgctttgtccgtactcggcagagcgttagcaggatcgtcgctctccatctcgatcaaataaatacgcgccaacaatgccggtagctcatgcggagcagccacactgtgtacccactcccctggcgctttctccagcggaataccaatatggcgacgacagaaggtcactaccgctctgccctgccattttttactcactacctcgtcagtgatcaacacatcttcgggagtcggttcctgcccttcgtatgttgtaacgacgatgccgctgcgctgcaaactggtttccaggaactgacagaggctcgcattgcggaccgccagccagcagcgtttaccactcaacccttccacgccttttttctgcgggtactgagcgccgtacaacggaatacgcacggtaaactggctgcccattcccggttcactatctacgctgatatcgccgtccatcatgctgatcagtttttcacaaatcgccagacccagaccggtcccctggaaattacgctgtacgcccgttccgacctggaagaagggatcaaacaagcgcaccacttctttcgccggtatccccacgccggtatcgcgaacacggatagagagataatcgccatccgcgcgaacatgcaaaactatacagccggtatcggtgaattttatggcgttactcaacaggttggagatgacctgctgtaaacgcatcgggtcgccatttaaggccactggcacatccggttcaataaagcagtacaagcctaactgcttgcgtaccaccagcggtaaatagttggcggtgatgtggttcatcacttcacgcggactaaactcacgcggttcgatcttcaactgttcgctttcaatcttgctgaaatcgagaatatcgctgataattttcaacaacaggctggaagagttgttcattgccgtcaccagccgatcgacgcctttcggtaactctttggtttgcaacagatccaggttaccgataatgccatacagcggcgttcgcagctcatgactgacggtggcaaggaacatgcttttactctggctcgcctgttccgctgcttgtgccatctcctgcaagctctcttccatcttcacgcggctagaaacatccaccagcacacaaatggccacgttttcattacgatagcggctatggacgaagctgatttgcagattggtattgttgctggtcaggacatcaacaaaattgacctgctgcccacagataatttgcgtcagtcgttggcggtcctcatgcgtaagcatattgagataggtatgcgccagttcgttacttaaaatattgacgccatcagcggtacgcaaaatgcagatacccactggcgcggaggcgacaatcttgcgattgaactgctcatgttcttccagtcgcagggcgtcgctttccgccggaatgaaaatacgtcgctcgtacatccgtgcgagagtaaacaatgcagctccggcaagcacattcagcaaaattgcgttaaggatcaacatgcgaatgcgttccagcaccttatcaaccggcacgctatacacgatgcttaggctactgggtggcagatttttcttcagcaccagctcccggaacccttccgtatagccaaaccaggagcgttcctgcatccagcgaggatcgcccttaattttactttctggtccggtaaggctaatcagggtatgaccattttcatcaagaatggtaacccccatcggcaacgtacccggtaagaaaaagttctccatccggatggtctgctcgacacccaaaagcgcctgcaaccggttcgccagataaactggcgtcaacgcgtaaaaatacccgacgccagggcgcggaccttcgctgatccagtagaggttactgccgctatcatcttgtggtgcatttcgatatttattgatgcgttcatgcaaagctttcaacgcggtatcgcgttccactggcatatcacgcagaccgaaattggccatgcagaggttatcgctgccgattaaaaatacccggtttagatcgtaagccgcagaaaaattatcgcgccagtagcgcataaaccacgccaaactctccagagaacctcgccaggtgttactcattgcggaacaatcggagtcggcaaacagcggttcaaacgcaggcacatccgcctgcgtttctcgtccacgcggggaaagcacaccgttttctgcgcttaagcgattttcggcgatgtacttcagctctttcatcacatcagaggtgcgttgaataaagcgctgagcctgatcggaactcagattaaattcctgacgaatttcgctttctcgctgatgtaacgcattaacgatgtaaaaaacggaactaaaagcaatcaacagccagagcactaacgccaatgctctgaacatgtagcggctggctttcagggttgtacgaaaagaagcaaggtatttcaaaggggcgaagctccgcctcaggtgaccgatggagtgtggttaaggtagcggtaaaagcgtgttaccgcaatgttctctcttctctggaatatgatacaccgccgagaaatcatcaccttaacctctgataatcgtcatataccggacaagactagtggatttcagcatgcattatatgaagtggatttatccacgccgcttacgcaatcaaatgatcctgatggcaatcctgatggtcattgtcccaacgcttactattggttatatcgtagaaacggaaggacgtagtgcagtcttatctgaaaaagagaaaaaactttctgccgtggtcaacctgcttaatcaggcactaggcgatcgctatgatctctacatcgacttaccacgtgaggagcgtatccgcgcattaaatgcagaacttgcccccattaccgaaaatatcactcacgccttccctggcatcggtgctggttattacaacaaaatgctggatgcgataatcacctacgcgcctagtgcgctatatcagaataatgtcggcgttaccattgccgcagatcaccctggtcgcgaagtgatgcgtacaaatacccctttagtttatagtggcaggcaggtgcgcggcgatattttgaatagtatgctccccattgagcgtaatggtgaaatcctcggctatatctgggccaatgaattaaccgaagatattcgccgccaggcctggaaaatggatgtgaggattatcattgtgctcaccgctggtttgctgataagcctgctgttgattgtccttttctcccgtcgcctgagcgccaatattgatatcatcaccgatggcctcagcactctggcacaaaatattcccactcgattaccacaattgcccggtgaaatggggcaaatcagtcagagtgttaataacctcgcccaggcactgcgtgaaacgcggacacttaacgatctgattattgaaaacgctgccgatggcgtcattgccattgaccgccagggtgatgtaaccaccatgaacccagcagcagaagttatcactggctatcaacgccatgaactggtagggcagccttactccatgttgttcgacaatactcagttctacagtccagtactggatacgctggaacatggcaccgaacatgtggcgctggagatcagttttccaggtcgtgaccgcaccattgaactcagtgtcactaccagtcgtattcataacacgcacggtgaaatgataggtgctttggtgattttctctgatttaactgcccgcaaagaaacccagcgccgcatggcgcaagcagaacgcctcgccacactgggtgagctgatggctggcgtcgcgcatgaagtacgtaatccgttaacggctattcgtggttatgtacagatcttgcgccaacaaaccagtgacccaatacatcaggaatatctgtccgtagtactcaaagaaatcgatagtattaacaaagttattcagcaattgctcgaatttagtcgtccacgccacagtcaatggcaacaagtcagcctcaatgcattggttgaagaaactctggtactggtacaaaccgccggcgtacaagcgcgggtcgacttcataagcgaactggataatgaattaagcccgattaacgccgatcgtgaactgctcaaacaggtactactgaatatcctgatcaatgccgtccaggctatcagcgcacgagggaaaattcgcattcaaacctggcaatacagcgacagtcaacaggccattagcatagaggacaacggctgtggcattgatctcagcctgcaaaaaaagatcttcgatccctttttcaccaccaaagccagtggaaccgggcttggtctggcgttaagtcaacgcatcattaatgcccatcagggtgatattcgcgtcgccagtttgccgggctacggcgcaaccttcacgcttattttaccgatcaacccgcagggaaatcagactgtatgactgctattaatcgcatccttattgtggatgatgaagataatgttcgccgtatgctgagcaccgcttttgcactacaaggattcgaaacacattgtgcgaacaacggacgcacagcattacacctgtttgccgatattcaccctgatgtggtgttgatggatatccgcatgccagagatggacggcatcaaggcactaaaggagatgcgcagccatgagacccggacacccgttattctgatgacggcctatgcggaagtggaaaccgccgtcgaagcgctacgctgcggagccttcgactatgttattaaaccgtttgatctcgatgagttgaatttaatcgttcagcgcgctttacaactccagagtatgaaaaaagagatccgtcatctgcaccaggcactgagcaccagctggcaatgggggcacattctcaccaacagcccggcgatgatggacatctgcaaagacaccgccaaaattgccctttctcaggccagcgtcttgattagcggtgaaagcggcaccgggaaagagttgattgccagagcgattcactacaatagccggcgggcaaaggggccgttcattaaagtcaactgcgcggcgctgccggaaagcttgctcgaaagtgaactgtttggtcatgaaaaaggtgcatttactggtgcacaaaccttgcgtcagggattatttgaacgagccaacgaaggtactctgctcctcgacgaaattggcgaaatgccgctggtactacaagccaaattactacgcattctacaggaacgggaatttgaacggattggcggccatcagaccataaaagttgatatccgcatcattgctgccaccaaccgcgacttgcaggcaatggtaaaagaaggcaccttccgtgaagatctcttttatcgccttaacgttattcatttaatactgccgcctctgcgcgatcgccgggaagatatttccctgttagctaatcactttttgcaaaaattcagtagtgagaatcagcgcgatattatcgacatcgatccgatggcaatgagtctgcttaccgcctggagttggccgggaaatattcgagagctttccaacgttattgaacgcgccgtcgtgatgaatagtggcccgatcattttttctgaggatcttccgccacagattcgtcagccagtctgtaatgctggcgaggtaaaaacagcccctgtcggtgagcgtaatttaaaagaggaaattaaacgcgtcgaaaaacgcatcattatggaagtgctggaacaacaagaaggaaaccgaacccgcactgctttaatgctgggcatcagtcgccgtgcattgatgtataaactccaggaatacggtatcgatccggcggatgtataacaccaaaacttgctatgcagaaatttgcacagtgcgcaattttctgcatagccgctcattctccttataaatccccatccaatttatcccttcatattcaattagttaaataactaaatccaataatctcattctggcactccccttgctattgcctgactgtacccacaacggtgtatgcaagagggataaaaaatgaaaacaaaattgatgacattacaagacgccaccggcttctttcgtgacggcatgaccatcatggtgggcggatttatggggattggcactccatcccgcctggttgaagcattactggaatctggtgttcgcgacctgacattgatagccaatgataccgcgtttgttgataccggcatcggtccgctcatcgtcaatggtcgagtccgcaaagtgattgctagtcatatcggcaccaacccggaaacaggtcggcgcatgatatctggtgagatggacgtcgttctggtgccgcaaggtacgctaatcgagcaaattcgctgtggtggagctggacttggtggttttctcaccccaacgggtgtcggcaccgtcgtagaggaaggcaaacagacactgacactcgacggtaaaacctggctgctcgaacgcccactgcgcgccgacctggcgctaattcgcgctcatcgttgcgacacacttggcaacctgacctatcaacttagcgcccgcaactttaaccccctgatagcccttgcggctgatatcacgctggtagagccagatgaactggtcgaaaccggcgagctgcaacctgaccatattgtcacccctggtgccgttatcgaccacatcatcgttagtcaggagagcaaataatggatgcgaaacaacgtattgcgcgccgtgtggcgcaagagcttcgtgatggtgacatcgttaacttagggatcggtttacccacaatggtcgccaattatttaccggagggtattcatatcactctgcaaagcgaaaacggcttcctcggtttaggcccggtcacgacagcgcatccagatctggtgaacgctggcgggcaaccgtgcggtgttttacccggtgcagccatgtttgatagcgccatgagttttgcgctaatccgtggcggtcatattgatgcctgcgtgctcggcggtttgcaagtagacgaagaagcaaacctcgcgaactgggtagtgcctgggaaaatggtgcccggtatgggtggcgcgatggatctggtgaccgggagccgcaaagtgatcatcgccatggaacattgcgccaaagatggtagtgcaaaaattttgcgccgctgcaccatgccactcactgcgcaacatgcggtgcatatgctggttactgaactggctgtctttcgttttattgacggcaaaatgtggctcaccgaaattgccgacgggtgtgatttagccaccgtgcgtgccaaaacagaagctcggtttgaagtcgccgccgatctgaatacgcaacggggtgatttatgattggtcgcataagccgttttatgacgcgttttgtcagccggtggcttcccgatccactgatctttgccatgttgctgacattgctaacattcgtgatcgcgctttggttaacaccacaaacgccgatcagcatggtgaaaatgtggggtgacggtttctggaacttgctggcgtttggtatgcagatggcgcttatcatcgttaccggtcatgcccttgccagctctgctccggtgaaaagtttgctgcgtactgccgcctccgccgcaaagacgcccgtacagggcgtcatgctggtcactttcttcggtagtgtcgcttgtgtcatcaactggggatttggtttggttgtcggcgcaatgtttgcccgtgaagtcgcccggcgagtccccggttctgattatccgttgctcattgcctgcgcctacattggttttctcacctggggtggcggcttctctggaagtatgcctctgttggctgcaacaccgggcaacccggttgagcatatcgccgggctgatcccggtgggcgatactctgttcagtggttttaacattttcatcactgtggcgttgattgtggtgatgccatttatcacccgcatgatgatgccaaaaccgtctgacgtggtgagtatcgatccaaaactactcatggaagaggctgattttcaaaagcagctaccgaaagatgccccaccatccgagcgactggaagaaagccgcattctgacgttgatcatcggcgcactcggtatcgcttaccttgcgatgtacttcagcgaacatggcttcaacatcaccatcaataccgtcaacctgatgtttatgattgcgggtctgctgctacataaaacgccaatggcttatatgcgtgctatcagcgcggcagcacgcagtactgccggtattctggtgcaattccccttctacgctgggatccaactgatgatggagcattccggtctgggcggactcattaccgaattcttcatcaatgttgcgaacaaagacaccttcccggtaatgaccttttttagttctgcactgattaacttcgccgttccgtctggcggcggtcactgggttattcagggacctttcgtgatacccgcagcccaggcgctgggcgctgatctcggtaaaagcgtaatggcgatcgcctacggcgagcaatggatgaacatggcacaaccattctgggcgctgccagcactggcaatcgccggactcggtgtccgcgacatcatgggctactgcatcactgccctgctcttctccggtgtcattttcgtcattggtttaacgctgttctgacggcacccctacaaacagaaggaatataaaatgaaaaattgtgtcatcgtcagtgcggtacgtactgctatcggtagttttaacggtagtctcgcttccaccagcgccatcgacctgggggcgacagtaattaaagccgccattgaacgtgcaaaaatcgatagtcaacacgttgatgaagtgattatgggtaacgtgttacaagccgggctggggcaaaatccggcgcgtcaggcactgttaaaaagcgggctggcagaaacggtgtgcggattcacggtcaataaagtatgtggtagcggtcttaaaagtgtggcgcttgccgcccaggccattcaggcaggtcaggcgcagagcattgtggcggggggtatggaaaatatgagtttagccccctacttactcgatgcaaaagcacgctctggttatcgtcttggagacggacaggtttatgacgtaatcctgcgcgatggcctgatgtgcgccacccatggttatcatatggggattaccgccgaaaacgtggctaaagagtacggaattacccgtgaaatgcaggatgaactggcgctacatagtcagcgtaaagcggcagccgcaattgagtccggtgcttttacagccgaaatcgtcccggtaaatgttgtcactcgaaagaaaaccttcgtcttcagtcaagacgaattcccgaaagcgaatagtacggctgaagcgttaggtgcattgcgcccggccttcgataaagcaggaacagtcaccgctgggaacgcgtctggtattaacgacggtgctgccgctctggtgattatggaagaatctgcggcgctggcagcaggccttacccccctggctcgcattaaaagttatgccagcggtggcgtgccccccgcattgatgggtatggggccagtacctgccacgcaaaaagcgttacaactggcggggctgcaactggcggatattgatctcattgaggctaatgaagcatttgctgcacagttccttgccgttgggaaaaacctgggctttgattctgagaaagtgaatgtcaacggcggggccatcgcgctcgggcatcctatcggtgccagtggtgctcgtattctggtcacactattacatgccatgcaggcacgcgataaaacgctggggctggcaacactgtgcattggcggcggtcagggaattgcgatggtgattgaacggttgaattaatcaataaaaacacccgatagcgaaagttatcgggtgttttcttgaacatcgacggcgaaggtaaccccattaatcaccagtcaaaacttttcaccagcgtcagctcgccagcattacgcatcggtacaataaatgtttcctgtttctcattgacgcttccttcatcggtgatcagcgtcagttgggcggtggttaattccgtttcgctgcgcccaccatagtagttgatatacacctgatagcgcccgtgaattggcgcgggcatggcgaaaatctcgggtccgtaccccgtcgtgacatccatatccagtgcaccactgtttttcagcacggtgttaccgtaccaggcgtgttcgccatcgggcgtaacaacgtgaaggtcgaggtcggtattgtccgtatcccagctgagaaccagccgtaaacgtgcacgaatcgttcctgtacccggcgtactgtaaaactgcattttttgtcggctttgcccatccgggctgatgacctgcacgctgttgctgccttcagtgaaaatataagggcgtgcaaaactaccatcggattcaattctctgcggcatactggcaccgttgaccaccagccggccctgctgaactttacccgccgcagcataattctttattttgccgcggatctgcgcactgatattttgatcatctgccatgttgacggagctcgccgggtaattgatgctttgactaaaactggcatcttcgccctctgccggatgccagccactgagcggtgcatcaatctcgacttcctgcacaccttcactgtgagcgacagggctaagcgccaccagtaacaacggaagaaaaatctttcgcatagcattagtccattaataattgtcgggtcagcgtttcgatatagttctcatcaagcccggtgggataaccatcaaaggccaggtgcagatactcatgggttaaatccagccgatcctgaagcgtaaagaagttacgaataaacagccgtttctgctgccgatcggtataggggaaaccactgactaaacggcaaaccgcaaacacgtctggttcgttgtaccccgtctcagcttgtaatatacgccgccactgcggcatttttttcgccagccaggctttcgctttgggtaataactggcaggtactgcgtggcgctccccagcggctaagactgttgtcgggataagcaaacgcgagtatctgatcgtaacgctctccctgccccgcctgggccgtggcttgccgccaggaaagtgtcccttcggtagcgcgactgccatgataatgaaccggatcgcctgcatagatgagatcctgcgtccaggcggtcatcgttcgcgcccccgtggtcgctgggctagcagaaacacgctgcgtggcgctgctgtcggggatggtcaggcaatcgccttcccgattggcgttttgctgtaaaaaagtgcgaatcgccacggtcatggctttcgctgcctcagggggcgtacttttcgcctcgcgatccagaactctggcaacgtactcttcacgatcgagatggctctgcaatttcagtttgcccttttcgctcagtaaggtcgtctcaccgtggctgacaaacgtaatgtggttaccattagtaaacgtcacacgatagcgcccattaagtacgccgggatttactgccgtcgtactcttttccgctgtgattttcttcagcggatagcgggcaaacagctccacctctacacattgcccactggcaacctgcgtcggcactggcaaaacccgattaagcaccgtcgcataacgggttagtaccgttttgctggtgccactgccagtaacccacagcggtgtaccatcggttaaccagccagcaaaaccaccctgacggatttcctgtttatcatcggcaaaccagctccaggttttcacccgtacccgactaccgagcatggatgcgacaccgattttcgcctcgtccagcaccacatccagtaagacttcctgagctttgttttgcgcgggtaacgtcgctaaactatcaagcaggcttttaaccgttacgctggtttctggcttcagcgtagtcagagacgctaaccacgcaggtgcctgacgctgttgccagtattgcccccacacatctgcgccaatatgcaaccgctgcggcgcaaaatagagcccacaggaacgtaccagcgcggtatcgcgcgttatgctctccccagcctgacaacaataaacctcttccggggagtttccgcgacactggtagggctgctccggttgatgggtatcctccagccaggcgtaaacatacagtttccacaaactccctaacggcgtggtgaggctgtcaggtaatgcactgactttggtcacgccactactgctcagctgatacagttgatcgtgctgcgcaccgcgcagcaccagttgtaacggcgtctcctccgcaagtgttggcagagtaaccaacgccaatagccagacgattcagcgccagttcacttatttcacctgcatcccggtccattcactccctgccgcaacactttgctgcgcaggtgcataggaacgcacataacgagcaggaggcagaacgaattgccctttttgcgagaagcgcagcaaatggcggaaagtgaccgttcccgtcagttctttcaccggcaccatataggccagttcgcccatttcatttcgcgctttttccagcaattgcccctgctgtttcgcggcgttgggtttattgaccgaaatgccccatgttgtgcgctcaacgtcggctcccggtggcagcggtacttccacctgaccgtagcgcagaactgcatcctgctcgctggtaagcgtgatttcatcgagatacagcgcatcgctgtcaatctcattgctggtcaccggttgcagaataaagctcatctcttcttcaccagggataagccgatacaactggcgttcaacggtcaccggaatgttactttgttgagccatttttgccggctcacgtcagcggacctgcacattttgcggcgataattcgtcaccaaaagagagaatgtccggcacgccctgaccaacccaacgccagtcttcgccccctccagttaacttatgtttagcccatgcgcccgcaggcgcaggcaaaacaactggaggcattgtcgccatatatttcgccagccagttcatggccagcgcgcgctcaatagtggattgctcagcggtcaaaccacttaaaatagcggccgtctgggtagcgtcgccaccgctattaagcagcacaaccgtgtgcgccagcggctgattgctgtttgccgctttatcccacgcatattgctgaacctgtggcatcaccgtggacttcaactgcgcttttttcagcaacgtcatggttaagacgtttgccaccgcatctgccagtggagactccggtgtatcgaggatcaggctatcattgatatcgcgggtgtcttcctcagagaaatcttcagttttagttccgcgccgggcgatagcttcatccaaccctttcaacaacgttttgcacggcaaattcatctcctgcgcccatgccagcaccagcgcccgatgcaataacggcatgttatctgcctgctccgcgtagctgtcgagcatatgctgccagtattccggttgttgcgttacgccgatcgcctggctggcctgccagtcggcgtaccatgcccatgccgtaaggaaggcgtcaccattgccatcttcaccccaccaggtaaagcgcgctccgggccccgccagttgcatcagccgcagacggttatcctgaatcatctgacgaatgtcgttagcggcggcactttgatgatcggcaagcgaacgccaggcgagactgagcgggatcagacggctaccggtgttgattacgccaccccacggttcatcgactaacgcatcaagattgttgcggaaaatctcctgcggcgtttcactactttgtagccggatattgctcgcctgctcgggcaacatcagcgcgttatcgccaccaccgagcatgacatttttctgctgttcaacgggccagctgttatccacaaaagacagttttgtgctaatgctgtcctgcacttgcccattttgttgcagttctgcacttaacaagccagattgctgaatattctgcgtcagcgaaatataattcgcccctttgtgcagcgtcagcgtctggcgcatctcagcgcctgcaaatttagtcaccagcgccaccggttcgttatcctgctgactgaagataaatagtcctgccgccggtttgtcgcccacgcgatacaccgttggcatactccacttcatgtagagatttttttccgaacgcagataagcacgcccctgcccgaccagcccgtcgccgttcatcccacgcgcggtgatacgccagcgggttaacgaatcaggcatcaggaacgtgaaatacgctttgccttgtttatcggttgtgagtgacggcatccatgccgcggtatccacctcttcacgccgtggacgttcaagcatttttactcgccgctcgctgcggttagttgcgccaggcgcaaccggctcgctggagagcgcctggtcgtagctgataaacgacagactggagctggtacgcacattgttacgccccagcggatagaaaaatttgccgatattcggcgcgatttctggttgcagcgcgtagatcatttcatcgaccacgcctaccgttagctgcgcagaaacaggtttacctttcagcgacgaggttaattcgacattgaccagttcaccaggctggtaatgggttttgtccgttttcacccggatatccagctggggaacggcaactttgatcccggcgttctgaaaactgtactgaccgttacgggtatacagcaccgaaaaagtgatgttaggcgcaaaggaattgctcactggaacccgggcttcatactgggtatcgtttaaacgttgtagcgttagccagtttgccggatgcgaaagcagcgactgctgttccacgcgatcgcgttccagcgtcaataatgcttcatcaattggctccggaaaggtaatcagcatcttcgcggtttcgcctggctggtacagcgttttatccgccacgatatctaccgtaccagtatgcgccgtgctgcccttaccgctgacggcatgacttaacccagcgagaattaagccgtctttatcgcgtaatgtcagattgtagttgccaggtttagcgaaattgacggtaaaggatttgccgcctgacggtagctctccgctatggctcgtgcggtcttcgagacgcaaccattcatacgtaacaggaacctgttttgaagattccagcgcggcataacggaacacaaccgactcgccgctattactgtattgtgcggcagtacttaatgagtaatgcgccagaccgcgttcaatgaggatctctttggtggtggtgacgcgatacgccgcgccgtcactggcggagacggttaacaaatagcggctcggtttatcggcggcggggagatttaacgccacatgaccgctggcgtcggacaccgtttcgctgccttccagcgacacggggaaacgtccggcataacgcaaatcgttaccgaccattgataattgctgagcgcgcaaacttaactgcacgcgggcattttttaccggctcgccatccgggtagagcagttgcagtttgccgctgaccgcttcgccagttttgaactcttttttggcgagagctaaaccaatctcgaaatgtggcttgatgtagtttgccacgcgaaaactgctgctatagacctgattgcggtaagcaagacgtaactcataacctccggctacggcattttctggcaggcggaaacttccctgcccgccattgcgcgcatccagcgtgacattgacggtttgcaacagactgccgttggcgtccagcaccgaaagcttcgccggggcgctgacgatgggggatgaatgcaacggatcgtggaactcgcggccgatcactttaacatcgacacgatcgcctgcgcgatatagcgggcgatcggtaaaaatatacaagcgggtgttgtagatttcgctttcgtagaagaagttctcggagacaaaaacgccgccttcagcatccttacccagaatgtatgaacgttctggcgatatatgttgtaactgcaaggtaccgctgtcatcggtcacaccgcgggtcatcacgccaagaccgtcagtccacaagatctctgagccgggcttcgcttcaccctgttttttacccgcggtccacaccagaagctctttgcctgacactttgctaagcgccacggtatcggaaacaaacaccaccgtcgtcgcccgatacccaccaaccatcgcctcgacgaggtacagtcccggctcttgttggccgagaggaatataaatgttacccggctgcggcgagatgaaattgctggatgcgccttccagttttaccccttgctgcggctcgaacggtttagcctgccatagtggataacggaactgtttcaccaggggatattttttcagcggggaaaactggttgttctgtacataacgggaaggtttaataatggcattgccgagctgtaattcgggtaacgcctgagtcacattctgccgtgactgagaagagaaagtacgctgcatcacgcggcgagatttgccgtaccagttatcccacagccaggttagcgtattgttcagcccgtcgcccagatattgcggttgcaccacaatgcgatgcaggtttttctgctggcgcaaaaatgccatcgggtcaggaatacgatacaggcgaacgtccacgccgccgtactcttccatctgatagcgccgataatcacgccccggcgcttccagtcgcactttcgcctcttcactgctgctaaaactgctgtcagcaagcaaaaagaatgttcccccggcaggcggcgcatagttgctggaaggaagcgaatcatcagcattagcaagccctgttcccacaagagacagggacaagcacgctgttatcgcgccagaaaatttaaacgataaatgccaatgaaattgggattggaatcgttgggtatccatcgggtgtccttccatgtcataagttgttgcagactgactgcgcgcattccgttgtcagttttcgtggcgcttccggtgtggtagatgacgtaacgccccatccagaccattaagtgctgggcatcgccctgatcgaaaaaaatcatatcgccaggcagcgcctggtttatgtcctggccaataaactggctgttgtactgaatcaaattaatcgcggtcacataggggccggttttcccgttcccctgattccagttttgcgccagttgacgctgttcaggtgttagcgtcatctctggcggcaaatactggctagataaaccgttactttttagccatttactgtcgtgaactttcagcgtctcgttcgccgcaaatcgcaccaggcccgcacaatcctgctgataccagcgtggacttggcccctggcggagctgttcttgtgcaatgcgtacaaaccaggcgcgaaacagcccggattgttcgacattcagcatttcgctatgggcaacaacacaacacagccagcaaatcagcgccagcagcccgtgcctcatagcggctgccaggttatgggtagccactgccaggcggcaccgggttccatctgggccagcttcatgacataacgcggttgttgagataaagcgtccagcttcggcattaataaagtttgtgcggcgttataaaaaaccggttcgagattcttcggcagactggtcaacgtttcgttacgcagcagtttcgctattccttgtggattgatatagagcggaacgatgccatcagtgggtattacatccaccattgccgggcgggttttattcagtgtttgcagcgcgttattaaccagcgtgtcatcgagggagaaaagcagcgttttgttttgcatcgccaggctcacacggaaaaaataatcgctcattaattgatcgggttgcgccgcctgcgctttcggatactggccgtatcgggaactcacttcgcgacgccagatttgcgcttcgccctgctgagtctggcttaccggcaaaacaccttctggcgctttgctttcgtgcgcaccaatattttgcgtaaacagtttccctggcaattgcgcctgttcggcagtgccatcaaactgaccgacaaacagcggggtttgcaatttactgtcttcataccagcacagccccgcggcaccgtctaacgccccattcagcttgtcgttttcctggctgatgtggctaagcatctcttcggcaataccgtgactatacggcaccgccacacagaagctggctccggcaggcatactgttccataccggcgtaaaatcgaaactggcatctacgctggcggattcatcatttaacgccacaaaactgtgccagccgtcgttacccatttcgaagcgtacgccagcaaaagaaggcattaaccgctggtagccaaaccccagccacctggcgctgactacgatgcgctggcgtactggcgttttttcggcagtacgctcttccaggccaaagcttgcttgccagcgttttttgccgctcaacaaatcacctgcgatcgccgtggcttcggtatcctgctgatcatctttaaacaacatatccgtgctggaaaacaccagcatcttgtcctgataagtcgcgaacatcagggcgttattgccgttatagcgcaactgataaacaggaacagtttcactatttatcttgatgctactgatttccgttttgcttaactggctgtcgctggtagcggcaaacaacaatggctccagcagtttgcttaaaccactgcgctggatcagcaccatataatgactaagatggccttgtttatcgtgccacagcgctgcctgcgcgggctgatctaagagactgctaaagagcttatctttcagcgtgagatcgtgttcatagacaatacgacgaatgctgccttcaatgcccagacgatcggcatgattctgataatagaaaacgaaatcttcgctcagaacatcgtggagaaacggaatggtgaggagatctttgggaagctggctcagagagtcgctgtcgagaaagaggtccggctcattgagatcgatttgcagattgttgtgcaccaccagcgggctcaacgttttttctggcccactgccagcatattgcaacgcccagacgccagcggaaagcagtgctattgcgccaaaacctacaagaccatagaaccgccagcctttcgccttttttcaccactcattgccacattccttgtgtatagccagccattttttacgggcacagccaaactttaccgtgccctaatacgacaaaagcccagactttgcagcctggacttttcaattcaaacaagggagatagctcccttttggcatgaagaagtaaaattattcttcttctggctcgtcgtcaacgtccacttccggagcgatttcatcgtccccttccgcggcactgccgtcgatggtatccagatcttcctcgtcaaccggttcagcaacacgttgcagacccactacgttttcatcttccgcagtacggatgaggatcacgccctgggtgttacggcccacgatgctgatttcgctaacgcgagtacgtaccagcgtaccggcatcggtgatcatcatgatctggtcgcagtcatctacctgtaccgcgccaacaactaaaccgttacgttcggtaaccttgatggagataacccctttcgtcgcacggctcttggttgggtattccgccactgcggtacgtttaccgtaaccgttttgcgttgcggtgaggattgcgccatcgccacgaggcacgatcagagagacgactttatcgccttcacctaagcgaataccgcgaacaccggtggtgttgcagcccatcgcacggacagaagactctttaaagcgcaccactttaccttcagcggagaacagcattacttcgtcttcgccgctggtcaggtcaacgccgatcagctcatcgccgtcaaccagtttgatcgccactttaccggcggtacgcagacggttgaactcggtgaggacagttttcttcacggtaccgttagcggtcgccatgaagactttcacgccttcttcaaactcggtcactggcaggatcgcagtgatacgttcgtcctgctccagcggcagcaggttgacgatcggacgaccgcgcgcgccacgagtggcttccggcaactgataaactttcatgctatagacgcgaccacggctggagaagcacagaatatggtcgtgagtgttcgccaccagcagtcggtcgataaagtcttcttctttaatacgtgcggcagatttacctttcccgccacgacgctgcgcttcgtattcagaaagcggctgatacttaacgtagccctggtgagagagcgtcacgaccacatcttcctgggtgatcagatcttccaggttgatgtctgcgctgttggcggtgatttcagtacgacgtttgtcaccgaactgttcacgaaccagctccagctcttcacggatcacttccatcagacgatcggcgctaccaagaatacgcaacagttccgcgatctgatccagcagctctttgtattcgtcgagcagtttttcgtgctcaagaccggtcagtttctgcaaacgcagatccagaatcgcctgagcttgctgttcggtcaggtagtacagaccatcacgcacgccgaactctggctccagccattccggacgcgcagcatcgtcgccagcacgttcgagcatcgcggcaacgttgcccagctgccacggattagcaaccagcgcagttttcgcttctgcaggcgtcggcgcatgacggatcagttcgatgatcgggtcgatgttcgccagcgccacggctaatgcttcaaggatatgagcacgatcgcgagctttacgcagttcgaaaatagtacgacgggtcaccacttcacggcggtgacgaacaaacgccgcgatgatgtctttcaggttcatgatcttcggctgaccatggtgcaatgccaccatgttgataccgaaagaaacctgcaactgggtctgggagtagaggttgttgagcacaacttcaccgaccgcatcgcgtttcacttcaatcacgatgcgcataccgtctttgtcagactcgtcacgcagcgcgctgatgccttccacgcgtttttcttttaccagttccgcaatcttctcgatcaggcgcgctttgtttacctgatacggaatttcgtggacgataatggtttcacgaccggttttggcgtcaacttccacttctgcgcgagcgcggatatacaccttgccgcgaccggtacggtaagcttcttcaataccgcgacgaccgttaatgattgccgccgtcgggaagtccggccccgggatgtgttccatcagcccttcaatgctgatgtcttcatcatcaatatacgccagacaaccgttgatgacttccgtcaggttgtgcggcgggatgttggttgccatacctacggcgataccggaagaaccgttcaccagcaggttaggaattttggttggcatgacgtccggaattttttccgtgccgtcatagttatcaacgaaatcgaccgtctctttttcgagatcggccatcagttcatgggcaattttcgccagacggatttccgtataacgcattgccgccgcagagtcgccgtcgatagaaccgaagttaccctgaccgtctaccagcatataacgcaggctgaatggctgcgccatgcggacgatcgtgtcatagaccgcgctgtcaccatggggatggtatttaccgattacgtcaccaacgacacgggcagattttttataggctttgttccagtcattgcctagtacgttcatggcgtaaagtacgcgacggtgtaccggcttcaggccatctcggacatctggcagcgcacggccaacaatgacgctcatcgcataatccagataggagctcttcagctcttcctcaatgttgaccggtgtaatttctctcgcaaggtcgctcatctaaccgctatccctctactgtatcccggattcaaaggtcgcaaattataacacagccgcgcagtttgaggtaaacctatacgctttattcacatccaatgcctgatatactcgtttgtcttgccaattacggagtagaagtgccaatgaatgccgaaaaaagcccggtaaaccataacgtagaccacgaagagatcgctaaatttgaagccgtcgcctcccgctggtgggatctggaaggtgagttcaaaccgctgcaccgcattaacccgctgcgtctgggctatattgccgagcgtgctggcggtttatttggcaaaaaggtgctcgatgtcggttgtggcggcggcattctggccgagagtatggcgcgcgaaggcgcgacggtgaccggtctggatatgggctttgagccattgcaggtggcaaaactgcacgcactggaaagcggcattcaggtggattacgtgcaggaaaccgtggaagagcacgcggcaaaacatgccgggcagtatgatgtggtgacctgcatggagatgctggagcacgtccccgatccgcagagtgtggtcagagcctgtgcgcaactggtgaaaccaggcggcgatgtctttttcagcacacttaaccgcaacggcaagagttggctgatggcggtggttggtgcggaatatattttgcgcatggtgcccaaaggcacgcatgatgtgaagaagtttattaaaccggcagaattgctgggctgggtggatcagaccagtttaaaagagcggcatatcactgggctgcattacaacccgatcactaatacttttaaactcggccccggcgtggatgtgaactatatgctgcacacgcagaataagtgaggttgatgtttggccgcgccaatgcctgatgcgacgcttgccgcgtcttatcaggcctacaaatgctccccgtaggccggataaggcgtttacgccgcatccggcaaccgtgccgactagacagtgattaccatttcaccgtcatgctcaaaaaccctgccgtctgggcaaaatcatcactccctttctgccacgccacgctgccgcgcagggacactcgctgactgatattgcccgtgactcccacttttatttcaccccgttgcttcaccgcatcgtcactgatagtgctgccatcctcttcaatttccgtgctatggggatcgtgataataattcagatctaatgttggtatgacatgaacagcggtacgccattcgctgtgtaaacccagccgcgtctgaatatcatcaccctggctttgactcacgcgcgcacggttagcggcggtaaaatcatcctgctgcacgccctgataaatcacctgcgcctgcggttcaatcaccacaccacgccccggtaaccactgataccccgcctccaggctggcgataatcccgctgctgtggtaatgatctgtgccatcttcttgttcggaaacatcattgctaaaccacgcgtattgcagccagctatccagccaggccccttgcttctgattaccgtgctgaaaccagctacttgtcagcccaacggcataaccgtggttctggttatcggcgcgagttccggtcatattgctgcggctgtcgccctggttatcgctgtagccaccaacaatcccaagcatccactcgccatccgtgccccagcgcccgctaaacagatcgccgctaagttgcaccgtagaagtgtcttcatgttgagccagttgccccgctgctgtgtaatgataatctccgccgataacacgtaaattcagcgtctgaccatcgccacctgcgtgatcgcgtcgctccatcataaacgcctgatttgccgcccgcaggttattaagataaccgccaactttggcattcaacaccggctggtaagcaggcgtaggttccgggtcgggtgttggatcaggatccggcgtgggatcaggatcgggagtcgggtctggatcaggtgggcttggcggcgttacttcttggcttcgcagataccagtcgttgttatcttccaccagcgtgtagtcatacgctcccatattgacgtagccgctgcctgccagactgaactgcgcattgttttgaaactgcgtgggatcagctgcgaaatcaaccactttaatgcctgtgcttgtcggctcaccaatccctgtaatggagttaaccaccacagttgtgttgccagcagtattaccgttcatcaccaattgatcgcttacgctgtcatcgccgtttaattcgctatcgagcagtagcgtaccgccgccggtataatcaccgtttaccgtcagcgtatcgccagcgacgccattttgcaggctaaccgcaccggacgtattggtcagattgccattaaccgtcacgttggaaagataagtcaggctgtcagtttcaaggttggtattaagctcacctgtcaacgtcacaccatcggtggcattcaccagcgtcccatcgccgttaaatagactggcattaagggcgacggaagtatcctgcccggtcaggcgcaaaaccgtaccatcgctgatgtcgatagtgccgctggaaatagcatcaatactctgaatatcctgatccgcgccagtaacgaacgttgccccatcaccaacccacagactgctagcataaggaaggatatcagcaacatcacctttcagggtgccttcttcgacacgtaccgcgctctgcgttgtaccgctggcggtcagctccagtgtaccagcccccgttttagtcaatgtgctaccctcatcctgatgctgcccgctgctgtcagccatcagtgcgccccactgcgtgtctacccccgcatcaactgccacttcaccgtcggcgcgcatttcaatatcacgtccgtggcctgccgcatcactacgcgtgtcaacgtcggaggtaatctccatcacgctttcttgttgcttatcggtaaagataacctggcggttatagtgggtatctccaagctggctgttgtcgctcaccatcagcgtaccggaggcgatttgtgttgtgcccaaataactattattgtttgccagacttacctgcccgtcgctcgcatcgaccaccacgtagacgccatctttcccgtcgccgccgatatgcaaattgtcgccacctgcaagatctaccacatcctgactgccgataaccgttccgctgctgccactgacttcaaggccatcgttgtaacttgtgccgctctgccaggtggagaaatcagagagatcgagcacaccgccgtttaacacgatgctctgcggatcgtcctggagagcggtaagatctgccgcgtcgccttccaggctaagcaccgcaccatcatcaacgactatatcgccggttagcgccatgctctgcgcccctgccagcacgtagctgccgttttgcgcaatggtgagctgaccagcaccttcgatgatgccagcaaaactgccctgattaacagtaacgttgccaccagcatcgatatttaaagtgccattctgaaagcccgtcaatgcgtgcacaaaagtttgttgggtgctgccaacgtttagctcagcctgattctgatactgatcaatactccctatcgtcagaccgtagcagtcttgcggatcgtcctggcaatgcgtatcgccgacattcatcagggagttgctgcggcccagggtaacttcaccgttttcaatctgcatctcaccagtaaagtcattgttatctgcattaagtaccagatcgccggaacctgttttggtgattaacccggtaccagcaatagagtcaacagctccgtcattctctgtattgccaataaccagcgtttttccgtcggcaatatcaaaggtaacttcacttaagccgagatacataaagccacccgccgcagaggaaggaccatctccatagcctgctgcgctattgttctcatcgactaacacgcctccgttctggctgtagctgtcatcaacagaaatatcaataagatagggagccgtcacgctattggtatatatcgccccgccataaccttcggcagtgttatttgtaaaggcagtgttatttactatcgtataaccactaggatgcttgctgtcgctattattatcggtaacatcgattgccccgccatcgccatcactgtaacttgtacttgtatatgcctggttgttatcaaaaataacatcacttaaataaacgtcattattaatggtataaattgcgccacctttgccatcattagcgatgttattgcgaaacatggcgttagtgacacgtaaatcgacggcaccagtatcgttagtaccagaagaatagattgcgccaccatagccgcctgcgacgttaccggaaaaaataacatcagtaagattcagcgtactgttttctttagcaaatatggccccgccgttattatattctcctgtaacggtgttattggcaaacagagtcattccagtttcattttctggtaatagactaaattccgctccttgttgcaaaaatacggccccaccgctggcgttattggtcatatcgctaaaaaccagccattgcccatcagcgatactccagtcctgcgtaatgccactaaggctttgcctgctggcctgacaactcgctttgacatcatatccctggcaactatcagtgaccgccgcgacaccgttagcagagaaaagagatgcaatcatactcgggagtaaagataaatactccttgcgtagaaagataatccgcatattaatctaaccatcattttctataagacggcgtatttaatcgcattatacgatatggaatatctttcttttgtaaattgttcaacccggtgcaatggctattttgttattatttgatgaataatatcagtgcgtcataattcaagttaataaccttcagggatatcagttatatttaaactaaattaaagtcatgaataattttcttataatataaggtaaattaacaaaatggcttagcatttaacaataaccgaatagaaaacaaccatttcgccatcaacaatctcttacattcgcttatatattgaccacaactgatacatcagattatgtgatgactcgtgcttagatcaatttttgcaatcattagcaaaaagattaataagccatctatatcaatttatctaacctattatgccgttcaagaaatcgccgaacagttatttttaacaaatttttctcttcccattgactttcccggacaccttgtctgacctaaggtgcgcgaaagccactttttccttcctgagttatccacaaagttatgcacttgcaagagggtcattttcacactatcttgcagtgaatcccaaacataccccctatatatagtgttctaagcagcttcccgtactacaggtagtctgcatgaaactattgcggaaagaattccaaaaacaggtacgacatacatgaatcagaatctgctggtgacaaagcgcgacggtagcacagagcgcatcaatctcgacaaaatccatcgcgttctggattgggcggcagaaggactgcataacgttagcatttcccaggtcgagctgcgctcccacattcagttttatgacggtatcaagacctctgacatccacgaaaccattatcaaggctgccgcagacctgatctcccgtgatgcgccggattatcagtatctcgccgcgcgcctggcgatcttccacctgcgtaaaaaagcctacggccagtttgagccgcctgcgctgtacgaccacgtggtgaaaatggtcgagatgggcaaatacgataatcatctgctggaagactacacggaagaagagttcaagcagatggacacctttatcgatcacgaccgtgatatgaccttctcttatgctgccgttaagcagctggaaggcaaatatctggtacagaaccgcgtgaccggcgaaatctatgagagcgcccagttcctttatattctagttgccgcgtgcttgttcagcaactacccgcgtgaaacgcgcctgcaatatgtgaagcgtttttacgacgcggtttccacatttaaaattagcctgccgacgccaatcatgtccggcgtgcgtaccccgactcgtcagttcagctcctgcgtactgatcgagtgcggtgacagcctggattccatcaacgccacctccagcgcgattgttaaatacgtttcccagcgtgccgggatcggcatcaacgccgggcgtattcgtgcgctgggtagcccgattcgcggtggtgaagcgttccataccggctgcattccgttctacaaacatttccagacagcggtgaaatcctgctctcagggcggtgtgcgcggcggtgcggcaacgctgttctacccgatgtggcatctggaagtggaaagcctgctggtgttgaaaaacaaccgtggtgtggaaggcaaccgcgtgcgtcatatggactacggggtacaaatcaacaaactgatgtatacccgtctgctgaaaggtgaagatatcaccctgttcagcccgtccgacgtaccggggctgtacgacgcgttcttcgccgatcaggaagagtttgaacgtctgtataccaaatatgagaaagacgacagcatccgcaagcagcgtgtgaaagccgttgagctgttcagcctgatgatgcaggaacgtgcgtctaccggtcgtatctatattcagaacgttgaccactgcaatacccatagcccgtttgatccggccatcgcgccagtgcgtcagtctaacctgtgcctggagatagccctgccgaccaaaccgctgaacgacgtcaacgacgagaacggtgaaatcgcgctgtgtacgctgtctgctttcaacctgggcgcaattaataacctggatgaactggaagagctggcaattctggcggttcgtgcacttgacgcgctgctggattatcaggattacccgatcccggccgccaaacgtggagcgatgggtcgtcgtacgctgggtattggtgtgatcaacttcgcttactacctggcgaagcacggtaaacgctactccgacggcagcgccaacaacctgacgcataaaaccttcgaagccattcagtattacctgctgaaagcctctaatgagctggcgaaagagcaaggcgcgtgcccgtggtttaacgaaaccacttacgcgaaagggatcctgccgatcgatacctataagaaagatctggataccatcgctaatgagccgctgcattacgactgggaagctctgcgtgagagtatcaaaacgcacggtctgcgtaactccacgctttctgctctgatgccgtccgagacttctagccagatctctaacgccactaacggtattgaaccgccgcgcggttacgtcagcatcaaagcgagcaaagacggtattttgcgccaggtggtgccggactacgagcacctgcacgacgcctatgagctgctgtgggaaatgccgggtaacgatggttatctgcaactggtgggtatcatgcagaaatttatcgatcagagcatctctgccaacaccaactacgatccgagtcgcttcccgagtggaaaagtgccgatgcagcagttgctgaaagacctgctcaccgcctacaaattcggggtcaaaacactgtattatcagaacacccgtgacggcgctgaagacgcacaagacgatctggtgccgagtatccaggacgatggctgcgaaagcggcgcatgtaagatctgatattgagatgccggatgcggcgtaaacgccttatccggcctacggctcggtttgtaggcctgataagacgcgccagcgtcgcatcaggctccgggtgccggatgcagcgtgaacgccttatccggcctacggctcggatttgtaggcctgataagacgcgccagcgtcgcatcaggcacaggatgcggcgtaaaatgccttatccggcattaaactcccaacaggacacactcatggcatataccacctttagtcagacgaaaaatgatcagctcaaagaaccgatgttctttggtcagccggtcaacgtggctcgctacgatcagcaaaaatatgacatcttcgaaaagctgatcgaaaagcagctctctttcttctggcgtccggaagaagttgacgtctcccgcgaccgtatagattaccaggcgctgccggagcacgaaaaacacatctttatcagcaacctgaaatatcagacgctgctggattccattcagggtcgtagcccgaacgtggcgctattgccgcttatttctattccggaactggaaacctgggtcgaaacctgggcgttcagtgaaacgattcattcccgttcctatactcatatcattcgtaatatcgttaacgatccgtctgttgtgtttgacgatatcgtcaccaacgagcagatccagaaacgtgcggaagggatctccagctattacgatgagctgatcgaaatgaccagctactggcatctgctgggcgaaggtacccacaccgttaacggtaaaactgtgaccgttagcctgcgcgagctgaagaaaaaactgtatctctgcctgatgagcgttaacgcgctggaagcgattcgtttctacgtcagctttgcttgttccttcgcatttgcagaacgcgaattgatggaaggcaacgccaaaattattcgcctgattgcccgcgacgaagccctgcacctgaccggcacccagcatatgctgaatctgctgcgcagcggcgcggacgatcctgagatggcggaaattgccgaagagtgtaagcaggagtgctatgacctgtttgttcaggcagctcaacaggagaaagactgggcggattatctgttccgcgacggtagcatgattggtctgaataaagacattctctgccagtacgttgaatacatcaccaatatccgtatgcaggcagtcggtttggatctgccgttccagacgcgctccaacccgatcccgtggatcaacacttggctggtgtctgataacgtgcaggttgctccgcaggaagtggaagtcagttcttatctggtcgggcagattgacagcgaagtggacaccgacgatttgagtaacttccagctctgatggcccgcgttaccctgcgcatcactggcacacaactgctgtgccaggatgaacacccttcccttctggcggcgctggaatcccacaatgtggcggttgagtaccagtgtcgcgaaggttactgcggctcctgtcgcacacgcctggttgcaggtcaagttgactggattgccgaaccgttagcctttattcagccgggggaaattttgccctgttgttgccgggcaaaaggcgatattgaaatcgagatgtgaattggttgtagtgccagatacaacgcttatgcgtcttatctggcctacaacgattacatggcgtagtaatacgctttcacctgctcccagtccgctttggggattggctccagatatttttccagctggcggaagtcatgattaatcgctttatcgcgacgcaagcggcgacgacttttctccaggtcaagaaaaccagcttctgcattaccttctgttttcacatagatatggcgaacataacaacagccatgctgacgattaatgctatgcattttcttaaacgccagcgccactgctttcaacatggcttgccgtacttcgtcagaataagggcttactgcatgctgggcataccagtcagcaatgctgatgaaccccgccatatcttcagtcaccagcaacgctcgccattcaccctcaattttcaccgcttcaccaaaaacgatcttcggcacgatgacaccggcccgttccagttctttaattaccgcaacctcacggacaatcgttggtcggccgaacggataacgtacggaatgaaacagatgatgcgtcatgcgctttacatacagctttttgccgttgcgctcgacgcattgcaccccgctcataccattacggcgatagttaggctcttcaacccagtcgccctctgttgcccaccagtgattaaattcgtcgtactttgcactaactgccataccctatcgcctgtcatttttattaacgacaatgactataggtggttacctgaggaaaatcttaatgaaacgtgtcgtattaatgaatttcttttgccactactagcttgacaccgcttttacccttcatttgcagcgcatagattccaccagccactaccactaatagtgcgcccagcagataaaatgtgaatttaatcaggcggatacagcgatgaattttattcgacagggattaggcatcgccttacaaccagagttaacgctgaaaagcattgcaggtgaattgtgttccgttcctctcgaaccaactttctatcgacagattagcttgctggctaaagaaaagccggtagaaggcagtccactgtttttactacaaatgtgcatggaacaattagtggcgattggaaaaatttgatatgagacaggatggcgcatgaacgccatcctgcagtaacattactctttattaagaaattttactgccttatcagggaaatcagtaaacagcccatttacacccgctttgttatacagagcatcatataactgattcacatcaggagtgtattcaggcagtttatcactccgcacggtataaggatgcactaccagtttattctgctgagcatcttgcaccatgccagtgagtttgatattacccggctggcttgtctcctcaatcaacatatggtaatccggaccaataccatctgcatattccgccacctgtttcatggcacccggcttaaacatccagtcgtagttgtaattaacccagcttccatccggctgtttctgctgcgtttcattccagtcggtataggcaatcagctgtaccagattgagctccatgcccattttgggttccagctcattcttaatacgcttcagctcatcagcatcaaaacattgcaaataaactttatcgtctttaccggtgtaaccatatttcttcagcacttccagcgtttttgccgcaatatccttcccttcctgatgatggaaccacggcgctttgatttctggataaataccgatatttttcccggtagagtgatttaacccctgaacaaattcaatctcttcttcaaaggtgtgcacccggaagtcggacttacccattgggaaacgccccggataagtctgcacttttttaccgttttcaatatcgaaaccttcggtaaatttcaagctcttaatttcatccagcgtgaaatctatcgcgtagtaacgaccgtctttgcgcgcccgatccgggaaacgatcggcaacatcagtaacacgatcgaggtaatggtcatgcagaacaaccagattgtcgtctttggtcatcaccaaatcctgttccagataatccgctccctgcgcatacgccatcgcttttgctggcagcgtatgctccggcaaatatccactggcaccgcgatgggcgatgactattttttcgttgctgtccgccgccattgcactgcttcccatgactatagtgctcatcatgatcgccatgctaaggtttttcagcgtcaatttcatgccattagcctccgttgcgttcttgcagtaattgttcatggcgacgtttttcgccaatcatcacaacaatcaacaagataaccgccagaatgctgccgccaatcattaccataaagccgccatcccagccgaagaagtccacggtgtagccaacaatcgcgctcgccgccacgctaccgcccaggtaaccaaacagcccggtaaagcccgctgccgtacctgccgcttttttcggtgccagttccagcgcatgcagaccgatcagcatcacaggaccgtagatcaggaagccgataacaatcatacaaatcatatcgacggttgggttacctgccgggttcatccagtaaacgatagtcgcgatggtcaccagtgtcataaagaaaacgccggttgccccacggttgccacggaagactttatcgttcatccagccgcacagcagagtgcccggaatacctgcatattcataaaggaagtaggcccaggaggatttatctagcgcgaaatgcttaacctctttcagataagtcggactccagtcgaggatgccgtaacgcagcagataaacgaacacgttggcgatggcgatataccacagcagtttgttcggcagtacgtactgcatgaagatttgcttcgccgtcagctcctgttccgctttttcgttatagtcgtccggataatcatttttgtactcttcgatcggcggcaagccacaggattgcggggtatcgcgcatcatcgcaaaggcgaataatgccaccagaatggcgcagaaagcaggcatatagagcgccgcatgccagtcattgaaccaggccatccccagcaggaacagcagcggcggaataccaccaccgacgttgtgcgcacagttccacacactcacaatgccgccacgttctttctggctccaccagtgcaccatagtacgaccacacggcggccaccccatcccctggaaccaaccgcagaggaacaacagtacaaacatcaccgcaatgctgctcgtcgcccatggcacaaagcccataaacaacatcactgccgccgccagaatcaaacctgcgggcaggaaaacgcgcggattgctgcgatcgcttacgctacccatgatgaatttgctaaatccataagcaatgctgatcccgctaagggcaaaacctaaatcaccgcgactgaatccctgctcaaccagataaggcatagcaagcgcaaagttcttacgaaccaaatagtaagccgcatagccaaagaatatccccaggaaaatttgccagcgcaatcgacgataagtcggatcgatctccgcggcaggtaagcgcgctttgtgtggcgctggtttaaaaatactcaacattgatagcctccgtggcccgtggtcttatttatgattaacagcctgattcagtgagagaacctgccgtttcttgagttgccgcgatgttaagaaaacattcataaattaaatgtgaattgccgcacacattattaaataagatttacaaaatgttcaaaatgacgcatgaaatcacgtttcactttcgaattatgagcgaatatgcgcgaaatcaaacaattcatgtttttactatggctaaatggtaaaaaacgaacttcagagggataacaatgaaaactcgcgacagccaaagtagtgacgtgattatcattggcggcggcgcaacgggagccgggattgcccgcgactgtgccctgcgcgggctgcgcgtgattttggttgagcgccacgacatcgcaaccggtgccaccgggcgtaaccacggcctgctgcacagcggtgcgcgctatgcggtaaccgatgcggaaagcgcccgcgaatgcattagtgaaaaccagatcctgaaacgcattgcacgtcactgcgttgaaccaaccaacggcctgtttatcaccctgccggaagatgacctctccttccaggccacttttattcgcgcctgcgaagaagcagggatcagcgcagaagctatagacccgcagcaagcgcgcattatcgaacctgccgttaacccggcactgattggcgcggtgaaagttccggatggcaccgttgatccatttcgtctgaccgcagcaaacatgctggatgccaaagaacacggtgccgttatccttaccgctcatgaagtcacggggctgattcgtgaaggcgcgacggtgtgcggtgttcgtgtacgtaaccatctcaccggcgaaactcaggcccttcatgcacctgtcgtggttaatgccgctgggatctgggggcaacacattgccgaatatgccgatctgcgcattcgcatgttcccggcgaaaggaagcctgctgatcatggatcaccgcattaaccagcatgtgatcaaccgctgccgtaaaccttccgacgccgatattctggtgcctggcgataccattagcctgattggtaccacctctttacgtattgattacaacgagattgacgataatcgagtgacggcagaagaggttgatattctgctgcgtgaaggggaaaaactggcccccgtgatggcgaaaacgcgcattttgcgggcctattctggcgtgcgcccgctggttgccagcgatgacgacccgagcggacgtaacgtcagccgtggcatcgtgctgctcgaccatgctgaacgcgatggtctggacggatttatcaccatcaccggtggcaaactgatgacctatcggctgatggctgaatgggctaccgacgcggtatgccgcaaactgggcaacacgcgcccctgtacgactgccgatctggcactgcctggtagtcaagaacccgctgaagttaccttgcgtaaagtcatctccctgcctgccccgctgcgcggttctgcggtttatcgtcatggcgatcgcacgcctgcctggctgagcgaaggccgtctgcaccgtagcctggtatgtgagtgcgaagcggtaactgcgggtgaagtgcagtacgcggtagaaaatttaaacgttaatagcctgctggatttacgccgtcgtacccgtgtggggatgggcacctgccagggcgaactctgcgcctgccgcgctgccggactgctgcaacgttttaacgtcacgacgtccgcgcaatctatcgagcaactttccaccttccttaacgaacgctggaaaggcgtgcaacccatcgcctggggagatgcactgcgcgaaagcgaatttacccgctgggtttatcagggattgtgtggtctggagaaggagcagaaagatgcgctttgatactgtcattatgggcggcggcctcgccggattactctgtggcctgcaactgcaaaaacacggcctgcgctgtgccattgtcactcgtggtcaaagcgcactgcatttcagttccggaagcctggatttgctgagccatctgccagatggtcaaccggtgacagacattcacagtggactggaatctttgcgtcagcaggcaccagcccatccttactcccttctcgagccacaacgcgtgctcgatctcgcttgccaggcgcaggcattaatcgctgaaagcggtgcgcaattgcagggcagcgtagaacttgctcaccagcgggttacgccgctcggcactctgcgctctacctggctaagtagcccagaagtccccgtctggccgctgcccgcgaagaaaatatgtgtagtgggaattagcggcctgatggattttcaggcgcaccttgcggcagctagcttgcgtgaactcggccttgccgttgaaaccgcagaaatagagctgccggaactggatgtgctgcgcaataacgccaccgaatttcgcgcggtgaatatcgcccgtttccttgataatgaagaaaactggccgctgttacttgatgcgcttattcctgtcgccaatacctgcgaaatgatcctgatgcccgcctgcttcggtctggccgatgacaaactgtggcgttggttgaatgaaaaactaccttgtagtctgatgcttttgccaacgctgccgccttccgtgctgggcattcgtctgcaaaaccagttacagcgccagtttgtgcgccagggtggcgtgtggatgccgggcgatgaagtgaaaaaagtgacctgtaaaaatggcgtagtgaacgaaatctggacccgcaatcacgccgatattccgctacgtccacgtttcgcggttctcgccagcggcagtttctttagtggcggactggtagcggaacgtaacggcattcgagagccgattctcggccttgatgtgctacaaaccgccacgcggggtgaatggtataagggagatttttttgcgccgcaaccgtggcagcagttcggtgtaaccactgatgagacgctacgcccgagtcaggcagggcaaaccattgaaaacctgtttgccatcggtagcgtgctgggcggatttgatcccatcgcccagggatgcggcggcggtgtttgtgccgtcagtgctttacatgccgctcaacagattgcccaacgcgcaggaggccaacaatgaatgacaccagcttcgaaaactgcattaagtgcaccgtctgcaccaccgcctgcccggtgagccgggtgaatcccggttatccagggccaaaacaagccgggccggatggcgagcgtctgcgtttgaaagatggcgcactgtatgacgaggcgctgaaatattgcatcaactgcaaacgttgtgaagtcgcctgcccgtccgatgtgaagattggcgatattatccagcgcgcgcgggcgaaatatgacaccacgcgcccgagcctgcgtaattttgtgttgagtcataccgacctgatgggtagcgtttccacgccgttcgcaccaatcgtcaacaccgctaccagcctgaaaccggtgcggcagctgcttgatgcggcgttaaaaatcgatcatcgccgcacgctaccgaaatactccttcggcacgttccgtcgctggtatcgcagcgtggcggctcagcaagcacaatataaagaccaggtcgctttctttcacggctgcttcgttaactacaaccatccgcagttaggtaaagatttaattaaagtgctcaacgcaatgggtaccggtgtacaactgctcagcaaagaaaaatgctgcggcgtaccgctaatcgccaacggctttaccgataaagcacgcaaacaggcaattacgaatgtagagagcatccgcgaagctgtgggagtaaaaggcattccggtgattgccacctccagtacctgtacatttgccctgcgcgacgaatacccggaagtgctgaatgtcgacaacaaaggcttgcgcgatcatatcgaactggcaacccgctggctgtggcgcaagctggacgaaggcaaaacgttaccgctgaaaccgctgccgctgaaagtggtttatcacactccgtgccatatggaaaaaatgggctggacgctctacaccctggagctgttgcgtaacatcccggggcttgagttaacggtgctggattcccagtgctgcggtattgcgggtacttacggtttcaaaaaagagaactaccccaccagtcaagccatcggcgcaccactgttccgccagatagaagaaagcggcgcagatctggtggtcaccgactgcgaaacctgtaaatggcagattgagatgtccacaagtcttcgctgcgaacatccgattacgctactggcccaggcgctggcttaaactcctttctgatgcccggtaagcatgtggttaccgggcatttttgcgtacacgattccgtgcccaatgtatgcgttgcaacgcagtgaaaattcctctgaaaacgtctcgcaaaggctgaaactggcagatgtcaaaggcctgggataaccgtaatgtcgcgtcatcataaatatcaggtgacggacaaccatgaccgaaagtacaacctcctccccgcatgatgcggtatttaaaacctttatgttcacacccgaaaccgcacgggattttctcgaaatacatttaccagaaccactgcgcaagctttgcaacctgcaaaccttacgcctggaacccactagttttattgaaaaaagtttacgcgcttactacagcgatgttttgtggtccgtggaaaccagcgacggtgacggctatatctactgcgtgattgaacatcaaagctctgcagaaaagaatatggcttttcggctaatgcgctatgccactgccgccatgcagcgtcaccaggacaaaggctatgacagagtcccgctggtggtgccgttgctgttttatcatggcgaaaccagcccttacccgtacagtctcaactggctggatgagtttgacgatccgcaacttgcccggcagttgtacaccgaagcttttctgttggtggatatcaccatcgtacctgacgatgagatcatgcaacatcggcgtatagctctgctggaactgattcaaaagcatattcgcgaccgcgatttaatcggcatggtcgacaggatcaccacgcttttggttagaggcttcactaatgacagccagctacaaacactgtttaattatctgctgcaatgcggcgatacctcccgtttcacccgttttattgaggagattgccgaacgtagtccactacaaaaggagagattaatgactattgctgaacggctacggcaggaagggcatcaaattggctggcaggaaggtatgcatgaacaagccattaaaattgctttgcgcatgctggagcagggctttgaacgtgagattgtgctggcgacaacccaactcactgatgctgatattccgaactgtcattaaaaggagagattaatgactattgctgaacggctgcggcaggaaggacatcaaattggctggcaggaaggtaaattagaaggtttgcatgaacaagccattaaaattgctttgcgcatgctggaacagggctttgatcgtgaccaggtgctcgcggccacccagctaagcgaagccgatctggcagcgaataaccactaattaacacaggcccacagccgatccccatgggcctttgatatcaataactaccttttatgcgtggcccatttttgccacttttaaacatcgccagtcgttgatccagggcatcgctgtagagcatcgtgtcaacgccaacagcgacaaagttcgctccccacgccaggcattgctgcgccatatcaggagccacagccagaaaaccagccgctttacccgcagcacggatccgccgaatactggtttcaataattcgctgcacttccgggtgcccggcgttatccgggtagcccaagctcgcagaaagatccgcaggtccaataaacacgccatcaatcccttcgacgtcgaggatttcgtccaggttatccagtgccgttttactttccacctgcaccaacagacaaaggctatcgttaacttgcgccatgtaattctcaatgcgtccccagcgcgcagcccgtgccacactggccccgacaccacgctcaccgtagggaggatagcgcgtggcagacaccacctgacgtgcctgttcggcagtatcgaccatcgggatcagtagagtttgcgcgccaatatccaggacttgtttaatcagcggtttactgccttccaccggacggatcacgggttggctggcatagggcgctaccgcctgtagctgatgataaagatcctgaatggtgtttggcgcgtgctccccgtcaatcagcaaccagtcataaccagaagtggcggcaatttctgccatataggcagtcgtactgcttaaccacagaccaatttgcacttcgcccttgcgtaaacgttctttaaagggattgcttaataatgcgttcatcgtgttccttaacctatttaatgatgtgccacgtcggtctgcgcaacagtgcgatttacacgcagagtgaaaataatcaggctaccgatgaccgccaccgctgccagcgtcagtaatcccgccgcatcgctggcaaataacgtttctgctttcacgcgcaggatcggggcaataaacccgcccactgcaccaaacaggtttacaaaaccaattcccgcagccagcgccgtaccggaaagcagttgtgtcggcatcgtccagaacactggctgcacggcaataaacccgatagctgcaacacacagcgctacgatcgccattactggagaaagcagcccggacagaccaataccaatgcccgccgccagtaatgtcagcgctgcgacattacgccgttcgccggttttatcggaatagcgcggaataagccaggtcccaaacaaggccgcaacccacggaatggcggtgaccacgctcgctgtaaagcccacttttgttcccagcaatgccgcaacctgggtcggcaggaagaaaattaatccgtaaaccgccacctgaatggtcaggtagataatcgctagttgccagactcggccattacgcagcgcatcgctcagccgagaagtcactttctgttgttcttcacttgccagttgattgataagcaacgttttttcttgtttactcagaaaacgtgcctgctccggtgtgtcatcaagccaaaagaatgtgaataccccagcaccgactgccaacaatccttcaatcacaaacatccagaaccagccgggatgccccataaatccatgcatctccaacagcgcgccggaaagcggacttcccagtgttaacgccagcggtgcgcccatatagaacagccccataatgctggcgcgattacgctgcggaaaccattggctggtgagataaatcataccagggaaaaatccggcctccgcagcacgaagcagagtgcgaactatcagaaatttcgcttcagtatcggcccatgccatggctgcgctaagaaatccccacagcagtgttgtcgtaccaatccaggttctggcccccagtttgcgcatcaaaagattcgccggaacacccagaaacgcatataccacaaagaaaatgcctgctcccagcgcataagcttcattactcaacccggtatcaatctggtaggtctgtttggcaaaaccgatattgctacggtcgagaaacgccagcacatacagcgccaacataaacggaattaaacgcacacggtttttcttcaccacggcgtcaagcaaagcggtgctcataaaaagctccttagaatatgtgggcgttaccgttgtcacagcaacgcccggagtgattagtggctgtaggggcgtttcaaattgcagtcatgattgagttcgacgccaaaaccgggtttatcaagcacacttttatgaatacgaccattcaccggaaccggctcattgagcagaatcgggtcaaactgcggacgcatcgtactacaatccgggctggtcatcaggaattcgctgaatggcgtattggtgaaggtgatcaccgcatggtgagagtaaacagagctaccgtgcggcaccaccagttgccccctggatttggcgattgcggcaatttccaccagcgtggttaaaccaccgcaccagccaacatccggctgcataatgtcgataccggtttcactaagcgtacgaaaagattgcagtgtgccgtggtgctcaccgctggtgaccatcattccgactggcgcgttgcgtttcagttcgcgataactttcatactgctgtggcggcaggcactcttcgatccatttcaggttatagggcgcgcaagcgtgggccagtttggtcgcatagttcacgtcctgactcatccagcagtcgagcattaaccagaaatcctcaccgcatttttcacgcatatccgcgaccatagcggcatctttgcggatccccgcatcgccatcatgtggcccccagtgcgtcggcattttgccaccgataaagcccatctcttttgccagatccggacgcgcacctgtggcgtagaactgaatctcatcacgaacagcgccgcctaaaagtttataaaccggaagcccgaccactttgccgaacagatcccacagagccagatcgacacaagaaatcgtattcatcaccaggccaccagagccggagtaatacagggtggcactgagcatttgatcgtggatcagtttgatatcactgacacatttaccctcaatgaaacggttaagatgtttttcgacaataaaacagcccatttcaccggctgtgctaacggcgaatccggtctggccgttttctgcttcgacttcaacaaccaacgtgccaagaacgttaatgccaaaactctggcgactctgctcgtaatcgcggtatttactcatcggggtggcaatatgatcgtctatccagtgattcgccccctggtcgtgataatcaccgccgccagcgcctttttctgctgtcgcaccgccagtaaaccaggcgcgaacctgtttaatttttggtagggtcatgatgttctccattgttaactggcttgtaagtcaaagggacttttccatcccaacagacgactaatatccctggcgcaggcaatggccttgcccgccagataatcacggtattcttcattgatttgtaagcgggtaccgaccacgctgatcgcagcggtaagctcgttattggcgttaaacaccggcgcagcgacacaacggacatcggcgtaatcttcgccgttgtcatagctccagccctgacggcgaatacgcgccagttcttcgtgaagttgctgtggatgagtaatcgttgtgggtgtcgcctgctcccagaccagcccttcgataatactttgctgtaccgctgcaggttgccaggcaagcaggcatttacctattccggagcgataaaggctaaggctttttccttcatgggaacgcacgctgatagtggcactactctccactttcaaaatgtaataagcgctgccgttatcaataatccccaggtgacataacagcccggtggtatccatcagttgcgtcaaacgcggtcgagccagttcccggagatccatcttgcttaacgcatgaccggaaagctccaccagcctggtccacaaacaaaaattttcctggtgatcaaggctaagaaaacgctgacgcctgagttcattaagcagcaaataggccgtgcttttagggattcccaatgtgtcaatgatcgtcgcagcactacaggggccaatgcgggcaatcaaattgagaatatcaatagcccgtgtcagggcgggaactttgctactttccaacatactggactccagtcttagatactggaatcagtctcgttgctcagggggagtaaaattgtgaagcgcatcaaatcccgctcctcgtccagcagactggagaaattacgcacaaatttgtgaatcagcgcacggattttttcttattgagtacaacaggttggacaaattttgccggagggggaatgtgccggtgcagtaaaccggcacagagtggcggaatcagacagataaggtcatggactcaacaacctcaatccagccatgctcactggcgatatcctggccgtttaaccaacggcgcagcatattcagtgccatcattgcgcacacttcctgacggatagccaggctgtagcgcgtagtgctgaaacgcacacgcagagcgaaagtgccgtctggcgtggctagcgcaaagttgagatgctcgttctcgaaaccgctaacagccagtgccagcccggcaaaatggttggcccgccgttctgtaatccagtgcgcagtttgcgccagggtttcctcctgactaggaaccacttcacacgccagcaatggagcacctgcgcgagaaagttgcaaagccaataaaccaccggtgaattgctcgctcaacgtcaggctgaactggcggttttgcaattcgcgactgatctgcgcgggcagtccttcagtgccttcgaaaatcacgctctgtccggcaacacgtttaacatccagccacagtttttccatcgcctgttgctcgcttgccggtccggtgagtttcagttcgatgataggcatactggagcgatagcccattgttacgcccggcggcagttgtagagtgtccaggctttgtgccagatcgctttcgctacgaccaaaagtagtcaaacgcagacaaaccggcggctgcggtaaagaaaaacgctcgcgcaggcgcggcaggatttcgtgctcgaccatcaccttaaattcactcggtacgccgggagtaaagaacatcaggcaacgattaagctgcacggcaaaaccacaggcggtgcctaccgggttattgataaattcagcactggcaggcagctccgcttgtttacggttgctcggtgccattactcgtccacgttcgtggaaatagcgttccatctctttgagccaggcttcatgcagcaccaggccttcaccttttgctgtcgcagcggcgagtgcgcttaaatcatcgctggtcggtcccagcccgccgttaacgatcagcacatcggcgtgctgactacgttcgcgaagaatggtgactaagtcatcaaggttatcccccaccgtattgcggcgagataatggcaacccctgatgaaagaaaaaatcggccagccaggcagcgttagtgtcaacgatttgcccgtgtaacacttcatccccggtggataacatttccacttttaacatggttatctcctgcttttgttatcgaatcactataacgcaaagggagataaggcgtagtaagaaactgaatggcgcgacagaatgccgcgccggaagggatcagaaactggcgttaaccccaacatacgggccgtcagccacggcgttgtcgcggttaccgtctttaccgctcagattcaggtagcgataacccgcctcaatactgactggacgcataatggtgtaacgcgcgccagcattcgcttcttcataactttgaataccgctggagaggctatccggagagtagtaatactcgccaaacaaacggaagctgttgccaattttccactgcaaaccacctcctaccgctgcggcataaccttcatcgccgtaattcgggttggtgtaaacgccttttccgccaacggtcgccattaacggcccgagaggcagattcaaccccagccccacgccagcgacatcaccgtcgtcgtcgttatgtgtccagttaccgcttaacgccaggcccgtcgtttcagtcccaaaaccgacaccaatattggtgtattctttacccgcctgaccgctgatgctcattgcattgacgcttgcagaaaccaacagcattccggccagacctgctagcgcaatttttttcattatcccctttcccacaagcaattaatcaaaattcccaaagctgcgggattgtactgcctggcacagaggattcaatgagcgaaaaaaaggatctagtcacttattgtaactaaatacttcttaaataattaaatgccgaaaaaataaacacactttatcgatacacacaaaaataataataagtacagttatcatcgcaaaagagattactgtcactttcacatatttgtgagttaccgtattctcatggtttctttttatttataaggaatatccctgtgcgacaacggactattgtatgccctttgattcaaaatgatggtgcttatttgctgtgtaaaatggccgacgatcgcggcgttttccccggtcaatgggcgattagcggtggcggcgtggagcctggcgaacgaattgaagaggcactacgccgcgaaattcgcgaagaactgggagaacagctgcttttgacagaaatcacgccgtggaccttcagcgatgatattcgcaccaagacgtatgcagatggtcgcaaggaagagatttatatgatttacctgatttttgactgcgtttctgccaaccgagaagtgaaaataaacgaagagtttcaggactacgcgtgggtaaaacctgaagatctggtgcattatgatttgaatgtcgccacccgaaaaacgttacgtttgaaaggtcttctgtaacaatgatgacagccattactggctgtcagattgaaaatttagtggttaacgaattccccatccagataaactttgcctttttccacatgcatgactaaaccatccagataatcaggtttaaatgtcgcgtcacgcttatctttagcaatatatgtcaggcaatgattatgggtgaaaataacgatatttttatcaggcgctttgctttgtaagtccttaattgcactataaatctcattaccgcactgaagaagtcgtttatctaccgtcaattttttacccgcactaaaccaggtagcgctctgaatggtccggacggtattactggaataaagatcgaaatcagggatatcagcactaaaagcgttgcccagttcacgggcatcctgggtacctttaaccgtaatacctgttttatcactcaagcattgattggtactacggtcgcaacgttcagcatgacgaaacaaaacgacaaccgggtgctgctgtgccagtctggccagtgttttattgtcgatacgtggcaaaccattgctactccaggcggcatgagtacccagtccggcaattgcagcgagcgccagtaaaatgatgatatattttttactcttcaagctagagcggcaaaaagctaacacgtaaactccacctatagacaagcgcaaccagacaattaccgtgaaattgagctacatttctggcgataattcgcagttggtgtaatattaaaaatcctacgatgtcggcaaaatgcctcaaaattttgccaaatgcaaagcctaaataagaaaaaatataaaaatttcaatatttacgtctaatattagtttcttaaggttaagttaatattctatccttaaaatttcgctccaaatggcaaaatatacacaacactctttatagcaaatataagtggacaggtattcaatggcggaaggaaaagcaatgagtgaatttttgccttttagccgaccagcaatgggcgtggaggaactcgctgcagttaaagaggttctcgaatccggttggatcacaaccggtccgaagaatcaggcgcttgagcaagctttttgccagttgacgggaaatcagcatgccatcgcggtcagtagtgccaccgccggaatgcatatcacgctaatggcgttgaaaattggcaagggcgatgaagtgattacgccttccctgacctgggttagtaccctcaatatgatttccttgttgggtgcaacgccggtaatggtggatgtcgaccgcgatacgctgatggtcacgcctgaagctatcgagagtgccattacgccacgcactaaagccatcattccggtgcattatgccggtgcgccagcagatattgacgccattcgcgccattggcgaacgttacggcatcgcagttatcgaagatgctgcccatgccgtcggtacgtattacaaagggcgacatattggcgcaaaaggtaccgctatttttagttttcatgccattaaaaatattacctgtgctgaaggtggcctgattgtaactgataatgaaaaccttgcccgccagctacggatgctgaaatttcacggtctgggtgtcgatgcctatgacagacaaacctggggccgtgcaccgcaggctgaagtcttaacaccgggctataagtacaatctgaccgatattaacgccgcgattgccctgacacagttagtcaaattagagcacctcaacacccgtcggcgcgaaattgcccagcaatatcagcaagcactggcagctctcccctttcagccattaagccttcccgcctggccgcacgttcacgcctggcatctgtttattattcgtgtcgatgaacaacgttgtggtatcagtcgcgatgcgttgatggaagcgttaaaagaaagaggcattggtaccgggttacatttccgcgccgctcacacacaaaaatattatcgcgagcgttttcccacgctgagcttaccgaataccgaatggaatagcgaacgcatctgttctttgccgctgttcccggatatgactaccgccgatgccgaccatgtcatcacagcccttcagcaactcgcaggacaataagccatgtttgaaatccaccctgttaagaaagtcagcgtggttattcccgtttataacgagcaggaaagcttaccggaattaatcaggcgcaccaccacagcctgtgaaagcttggggaaagagtatgagatcctgctgattgatgacggcagtagcgataattccgcgcatatgctggtcgaagccagtcaagcggagaacagccatattgtgtctattttgcttaaccgcaattacgggcaacatagtgcgattatggcgggattcagtcacgttactggcgacttaattattacccttgatgccgatctccagaatccgccagaagaaatcccccgcctggtggcaaaagccgatgaaggttacgacgtggtagggactgtacgccagaaccgccaggacagctggtttcgtaaaaccgctagcaagatgattaaccggcttattcagcgcaccactggcaaagcgatgggtgattacggttgtatgctgcgcgcctatcgccgtcatattgtcgatgcgatgttgcactgccatgaacgcagcacctttatcccgattctggcgaatatcttcgcccgccgtgccattgaaattccagtacatcatgccgagcgtgagtttggtgaatccaaatacagttttatgcgcctgattaatttgatgtacgacctggtgacctgccttaccacaacgccgctacgtatgctgagtctgctcggcagcattattgcgattggaggttttagcattgcggtgctgctggtgattttacgcctgaccttcggaccacaatgggcggcagaaggcgtctttatgctatttgccgtgctgtttacttttattggcgctcagtttatcggcatgggattactcggtgaatatatcggcaggatctacaccgatgtccgcgcccgcccccgctattttgttcagcaagttatccgtccatccagcaaggaaaatgaataatgaaaaccgtcgtttttgcctaccacgatatgggatgcctcggtattgaagccctgctggctgccggttacgaaattagcgccatttttacccatactgataatcccggtgaaaaagccttttatggtagcgtggctcgtctggcggcggaaagaggcattccggtttatgcgccggataacgttaatcatccgctgtgggtggaacgcattgcccaactgagcccagatgtgattttctctttttattatcgccatcttatttacgacgaaattttgcagctcgctcccgcaggtgcatttaatctgcatggtagcctgttaccaaaatatcgtggtcgcgcgccgctgaactgggtgctggtcaacggtgaaacggaaactggcgttacattgcaccgaatggtgaaacgtgccgatgccggggccattgtggcgcaactgcgcattgccattgcgccagacgatatcgctattacgctgcatcataaattgtgccatgccgcgcgccagctactggaacagacattacccgccattaaacacggtaatattctggaaatcgcccagcgcgaaaacgaagccacctgttttggtcgcagaacgccggatgacagtttccttgaatggcataaaccggcatccgtactgcacaacatggtacgtgccgttgccgatccgtggccgggtgccttcagctatgttggcaatcagaaattcaccgtctggagcagccgtgttcatcctcatgccagcaaagcacagccggggagcgtgatttctgttgcgccactgctgattgcctgtggcgatggcgcgctggaaatcgtcaccggacaggcgggcgacggcattactatgcagggcagccaattagcgcagacgctgggcctggtgcaaggtagtcgcttgaatagccagcctgcctgcaccgcccgacgccgtacccgggtactcatcctcggggtgaatggctttattggcaaccatctgacagaacgcctgctgcgcgaagatcattatgaagtttacggtctggatattggcagcgatgcgataagccgttttctgaatcatccgcattttcactttgttgaaggcgatatcagtattcattccgaatggattgagtatcatgtcaaaaaatgtgatgtcgtcttgccgctggtggcgatagccacgccgattgaatatacccgcaacccgctgcgcgtatttgaactcgattttgaagagaatctgcgcattatccgctactgcgtgaagtaccgtaagcgaatcatcttcccgagtactagtgaagtttatgggatgtgtagcgataaatacttcgatgaggaccattctaatttaatcgtcggcccggtgaataaaccacgctggatttatagcgtaagtaaacaattacttgatcgggtgatctgggcctatggcgaaaaagagggtttacagttcaccctcttccgcccgtttaactggatgggaccacgactggataaccttaatgcagcgcgaattggcagctcccgcgctattacgcaactcattctcaatctggtagaaggtagtccgattaagctgattgatggcggaaaacaaaaacgctgctttactgatattcgcgatggtatcgaggcgttataccgcattatcgaaaatgcgggaaatcgctgcgacggtgaaattatcaacattggcaatcctgagaacgaagcgagcattgaggaactgggcgagatgctgctggcgagcttcgaaaaacatccgctgcgccatcatttcccaccgtttgcgggctttcgcgttgtcgaaagtagcagctactacggcaaaggatatcaggacgtagagcatcgtaaaccgagcatccgcaatgcccaccgctgcctggactgggagccgaaaattgatatgcaggaaaccatcgacgaaacgctggatttcttcctgcgcaccgttgatcttacggataaaccaagttgacctaagatcttacggataaaccatcatgaccaaagtaggcttacgcattgatgtcgatacctttcgtggcacccgtgaaggcgtgccgcgtctgctggaaatcttgagtaagcataatattcaggccagcatttttttcagcgtcggcccggacaatatgggccgccatctctggcgactggtgaagccacagtttttgtggaagatgctgcgcagtaacgcggcaagcctttatggctgggatattttactggcaggtacggcctggccaggtaaagagattggtcatgccaatgccgatatcattcgtgaagcggctaaacatcacgaagtcggcctgcacgcctgggatcaccatgcctggcaagcccgtagcggtaactgggatcggcaaacaatgatcgacgatattgcacgcggtcttcgcactctggaagagattatcggtcaaccggtaacctgttctgccgctgcgggctggcgtgccgaccagaaggtgatcgaagcaaaagaagcgttccatttgcgctacaacagcgattgtcgtggggccatgccgttccgtccattgctcgaaagtggaaaccctggcactgcgcaaattccggtgaccttacccacctgggatgaagtgattggtcgggatgtgaaagcagaagattttaacggttggttactcaaccgcatcctgcgagataaaggcacgccggtttataccattcatgcagaagttgaaggctgcgcttatcagcataattttgtggatctcctcaaacgcgcagctcaggaaggcgtgacattttgccctttaagcgaactgttaagtgagacgttgccgctcggacaagttgttcgcggaaatattgccggacgtgaaggctggctgggttgccaacaaattgcgggtagtcgctgatgaaaagcgtacgttaccttatcggcctcttcgcgtttattgcctgctattacctgttaccgatcagcacgcgtctgctctggcaacccgatgaaacgcgttatgcggaaatcagtcgagaaatgctggcatccggcgactggattgtgccccatctgttagggctacgttatttcgaaaaacccattgccggatactggattaacagcattgggcaatggctatttggcgcgaataactttggtgtgcgggcaggcgttatctttgcgaccctgttaactgccgcgctggtgacctggtttactctgcgcttatggcgcgataaacgtctggctctactcgccacagtaatttatctcagtttgtttattgtctatgccatcggcacttatgccgtgctcgatccgtttattgcattctggctggtggcgggaatgtgcagcttctggctggcaatgcaggcacagacgtggaaaggcaaaagcgcaggatttttactgctgggaatcacctgcggcatgggggtgatgaccaaaggttttctcgcccttgccgtgccggtattaagcgtgctgccatgggtagcgacgcaaaaacgctggaaagatctctttatttacggctggctggcggttatcagttgcgtactgacggttctcccttggggactggcgatagcgcagcgggagcctaacttctggcactattttttctgggttgagcatattcaacgctttgcactggatgatgcccaacatagagctccgttctggtactacgtgccggtcatcattgccggtagcctgccgtggctgggattactccccggtgcactgtacacaggctggaaaaaccgcaagcattccgcaaccgtctatttgttgagctggacgataatgccgctgctgtttttctccgtcgctaaaggtaaattgcccacctatattctttcctgctttgcatctctggcaatgctgatggcgcattacgctttgctggcagcaaaaaataatcctctggcgctgcggattaatggctggattaacatcgcttttggcgtcactggcattattgccacatttgtggtctccccgtggggaccaatgaacacgccggtgtggcaaaccttcgagagctataaagtcttttgtgcctggagcatttttagcctatgggcatttttcggctggtacaccttaacaaacgtcgaaaagacctggccttttgccgcgctttgcccgctggggctggcgttgctggtaggatttagtattcctgacagagttatggaaggaaaacatccgcaattttttgtcgagatgacacaagaaagtcttcagccaagccgctatattcttactgatagcgtcggtgttgccgcaggtctggcatggagcctgcaacgcgatgacatcatcatgtatcgccagacaggtgagttgaaatacggccttaattatccggatgcgaaagggagatttgtcagcggtgatgagttcgcaaactggcttaatcaacatcgtcaggaggggattattactctcgtgcttagcgttgaccgcgatgaagatatcaacagtctcgccattccgcccgcagatgccatcgatcgtcaggagcgtctggtgctgattcagtatcgtcccaaatgatctggctaacattagtctttgccagcttgcttagcgttgccgggcagttgtgtcagaaacaggcaacctgctttgtggcgataaacaaacggcgcaaacatatcgtgctgtggctgggactggcgctggcttgtcttggtcttgccatggtgctctggctgctggtcttgcagaacgtaccggtaggcattgcttacccgatgttaagtctgaattttgtctgggtgacgctggctgcagtaaaactgtggcacgaaccggtaagcccgcgtcactggtgtggggtggcgttcattattggcggcattgtgatcctcgggagtacggtgtaatgggcctgatgtggggattattcagcgtcattattgccagtgttgcgcaattaagcctgggttttgcggcgagtcatctgccgccgatgacgcacttatgggattttatcgcggctctgttagcttttggcctggatgcccggatactgttactcgggctgctgggttatctgctttccgttttttgttggtataaaacgcttcataaacttgcgctaagcaaagcctatgccttgctcagtatgagttatgtgctggtatggattgctagtatggtacttcccggctgggaagggacttttagcctgaaagcactactgggagtagcctgtattatgagcgggttgatgctgattttcctgcccacgacaaaacaacgttactgagttttccctgccactttacactgccgttcccactcatcggggctataactgcttgcgctgaggactttcaccgtatgcagcttttcacgattaatacaataaagcgcattctgcaaagggctgagtaaatcccccactttcacggcgaagtcactcttcacttcggcgatcatttttatcgcgccgccagcatcgcagagcataagtacatgtctgttatcttgtttattgcagcagctttttttgaccagccattccattgcattatcctgtttgctaagagttttcacatcaatttacagattaacagataaactctttatcaacggcaatggaatggcagaaatgagaagtgaaacggagggttaattattgctgacgttgcacccactcttttagcgcctgacgactaattttaataccgccgtttttcagctccggcggcagagttagccagcgcaccggttgttgaaaacgggccagcttatctttcacccattcactaagatcaacgctctcgtggtcatactccatcaccgccaccggtcgatgaccaaactccttgtcggcaacggggacgataaacacctgcaaaaccgcaggatgtgcagcaattacgcgctcgacttcttccggctgaataccctctccgccactgaagaatagattgtctaaacgtccgacaatggtcagcttgccattatgcatctcaccgcgatcgcgcgtagcgtaccagccttcgtcattaaccagactaaccagttgcccgttacgccagtaaccttctgccatactggcagcccgcagccacacttcattattaacgattttcacttcccgacccggcagcgggctaccaacgtctgccaggccgtcggcttctttcgcacacaccgtggaggcaaactcggtcagaccatagccgcaaaagcaacgaatcccctgctcgcgcgcctgttccgtcaactcgaccgggatagccgcgccgccaagtaacaccgctttcagggaaacggaactacggttaaccagcaaacgccagagttgtgttggcaccagactagcgtgagtacagcctgccagcatttgctccaatggctgtttatcacgtaccgtcatccgcgcaccagcgtataaccagcgccacataattccctgaccggagacgtgaaacagcggtaaagagagcaaccaatcatcgtgatcgccaaacggaatcaggcttaacacaccttgcgcactggcaagatgggcctgataagtatggacagcggctttcggcaaaccggtagaaccgctggtcaacgtcatactgcacagacgcgtcggctgccacgtagcggcatgtgcgccttcaaccagctgaatgtgcaggctcgttaatgccggaaacgtgttttccccatccggcaccagagcaaattgcagcgtcagattgggcagcaattcttcaagcaacggttgcggcagctgagggttcacgggcaacacccgcgccccgcattgcagtaacgccagccaggcgagcagcgtttgcggcgtattccacgcccgcaacatcacgccgctgccctcaaccaccccctgcaccgcaaatccggaggctaattcatcgacgcgagcacaaagctcgcgccagttgagttgctcgtcattaagacgtaaggcgatggtttctccccgcacttgccgccagtgacgccacggccagtcagagaagatcataacaaccgctccagtgcatcaacttccacgacaggcagcgtgctacccggccagcgacgtacctgctgcgcctgcatcagatccagcgtgtccagccctggaatggtgtccggcgttaaccaggcggcaatccgcgccagttgcgttaagcctaagctgctttcaatggaagaactgatcaccgccgtcagccccagcgcgtgcgccgcctgtacctgctcgcgtactttttccagactgcccgtgagcgtgggtttgataactaccgcgcgcacgccctcttcagccacaaaggcaaaatccggctcgcgcaggctttcatcccaggcaatggcaatgccggtttcacgggcaaacgctcggctatcatcgcgggttttgcacggctcttcgagaaacgcgatgcggtcgcgataatccgggttaacgtatttggcaaactgctgacctttcagcggtgtccaggcgcgatttgcgtcaagacgcaaatgcagatccggaattgcctccagcaacagattcaccaccatgccgtcgcgcaccgcttcgtacaatcccactttgaccttcgccactttctcgcctggcatatctgcaagtttgaggatcagatcgtccggatcgccattacacagcggtgccgcacggtagttggctgcttgcggcaacgtatctgtcagttctgccaatgcacagcttacgccaaaggccacggaaggcatctgcggtagctcgcaatcgcctgccagccagttatttacccaggcaagcagcacactttgcgcctcttcccaggtttcctgactgaagcccggcagtggggagatctccccccacccttcgcgctcgccttcacgcaggcaaacatacagcccgtcgcgggtttttaaccgcctgtcgcgcagaaccacccccgcgtccatggggatctgccagcggtatacctgcgcgctacgcattacggattccgtttgaatttgctgaagtcaggctgacgtttctggttgaaggcgttgcgaccttcctgaccttcttccgtcatgtagaacagcatggtggcgttgcccgccagctcctgcagccccgcctgcccgtcacagtcggcgttcagtgcagctttcaggcagcgcagcgccatcgggctgttttgcagcatttcgcggcaccaacggacggtttctttttccagatccgccagcggtaccacggtgttcacaaggcccatatccagcgcctgttttgcgtcgtactgacggcacaggaaccagatttcacgcgcttttttctgcccgacgatgcgagccatgtaggaagcgccccagccgccgtcgaaggaaccgactttcgggccagtctgaccgaagatggcattatctgccgcgatagtcaggtcgcacatcatgtgcagaacgtgaccgccgccgatggagtagccagccaccatcgcgacaaccggtttcggacaggtacggatctgacgctggaagtccagcacattcaggtgatgtacgccggaatcatctttatagccgccgtaatcaccacgcactttctggtcaccaccggagcagaacgctttatcgcctgcaccagtcagaatgatcacgccgatgttgtcgtcataacgcgcatctgccagcgcctggatcatctcttttaccgtcagaggacggaaggcattgcgcacctgcggacgattaatggtgatttttgcgataccgtcggtggatttttcataacgaatgtcctcgaaaccttcggagcagtcgtgccattcaaccggtgcgtaaagcattgcttcatcaggataaatcatattgtgtcctttagtcagaaacgcaagatctgcgccagacttgcgattacgccagcgggattttcccgatgcgcgttatgtccggcgcgaggaatgacatggcagtcggcagccagttccgccgccagggcgcggaatttgctgtcacgttcaccacataaataataaaacgcaaatgtgcgggcgctaaggttagcacgtaaatcaggctggacggcgagagaagtcgcctccagcatggcggcaagcgttgcgccattattgttgctgcgcagcgccaccagctcccggcgttgatcgtcattgagactggcaaaaacaggctgttgataccagtcggcaaataccgccgttaacggttctgtgagaaaacgctgcacccattggcgatcggaacgctgacgttccgcacgttgttcagcattttgcagccccggatgcccgccttcgacaataaccccacaaagccccgccagcccctggcaagccgccatcatcgccacccgtccaccaaggctgtaccccaccagccagaagtcaaggatgttgtaactaaccaaggttttacgcagtaagtcggtgacatcatcaaatccatcgacgctaatcgccgcgctaccaccgtgacctgggagatcaacatacaaccgactgtagtcggcaaacgcctcgcccacttcttgccattcgtggcaatcgccggaaaaaccgtgcaaaaacaccagccagggtaaacctggttttccgtgttttgcctgcgcgtgcaggatcataaatggcttacctgcgccagaagttgctggagcgtttgcgcaccatcggtgtcgttaaccaccatttcaatcaccgtggtggttggcgtgcgccaggcgtcggcaaatgccgtttcaagttcctgccagttttgcggacgatgatatttcagctcgaacatcgcggcggcgtgctcaaaatggacgttttgcggcatcagatagaaacgctcacgctcgctttgcggcgttggcaacaggctgaaaatttgcccgccgttgttgttcaccacaattaataccagcggcgcagaaacctgacgcaataacgccagcgcgttgagatcgtaaagtgcggagagatcgcccacaatcgccagcgtcggtttgccgcttgcccgctgaacgccggcggcggtgctaagcagcccgtcgataccgctggccccacggttgctgtacaccgggtaacctgccggaagttggctaagcgcatcaatcagacgtaccaccaggctgttaccaacaaacaattgcccctgttcaggcagatagtcgcagatgcgatgcgccagttgcgcttcgccaaacgcatcacggcgggcaataaccgcctgcattgcctgttccgccaggcgcgggatttcaacgcaccagggctggcgtttttctgccggatgcagctccagccagtcggcaatattggcaattaagcgacgtccgcgatggtgtgccggatcaagtcgcccttcaatgtcatcaacaatccagtactcttctggttcacagcttgcctgccattgcaggagccgtttccccgtcaggctgcttcccagttgcaccacaatttgcgcctgctgcagctcgctggtcgctttggcattgcctaaccaaagatcggcacacggcagcggctgcccggtttgactcagcacatcgccaatcagcggccagccaagagtttgcgcccacagggcaacttttttgccctcttccgcactcatgcgcccggcaaccaccacgccgcgcttttgtcgccagaagaaccagtcgcgctgtttttcactttccagacgaggcgcttcacgcagccacggtttgtcttcctgccaccagtcacccagacgctgttgccagctaagcccggtatcgtccatttcgccatacagcggttcagcaaacgggcagttgatatggactccccccgcatgaagcgtaccgagagcgtggtcgatggtagaaaccagccaacgtgcggggatatcctgggtcgggcgcggcaaactaatactgtgcgtggggtgagaggcgaacattcccggctggcgaattgcctgattcgcgccgcagtcaattagctccggcgggcgatcggcggttaagagaatcagtttttctccggttaacccggcttcaatcagtgccggatagagatttgccaccgccgtgccggaggtcacaatcaccgccaccggctgcttgctgactttcgccagccccagcgccagatgccccaacccacgctcatcgaaatgggtgtggtgaatgaatgcggaattctccgccgccgctaacgttaacggtgtagaacggctgcctggggcgatacagatgtgtctgacgccgtgacgcgttaatgcttccagaatgaccgccgcccagcgtcggttaaatgcgcttacactcatgagtttgtccggtatcaatattgcggctaagtataaggagctacaaaaatagattattgatatgaatcggtaatgatgcgactcattattattccatttgtaataaagtacgcagccctgccgctttgttgtcgatttcctgccactcttgctcggggtcggaaccacggacaatgcccgcgccagcatataatcgcacgacattgccgctaatttttgcactgcgcagggaaacgcagaattcgctttgttgtaaactgagatagcccgcagaaccggcgtaccattctcgggtgaacggttcgtgacgggcgataaactgtcgcgccagatcgcgcggtaagccagcaactgctgccgttggctgcaactgatgtaaacagatcacatcatccgctttgttgagactagtccagatacagcggcgaagatgctgcactttacgcagacgcagtacctgcggcggtaaaacatccagcgtctgggtatcggcctgtaatcgttgacagatatcttccaccaccagcatgttctcgcgctggtttttatcatccgccatcagccactctcctaactgctgcgcctgcttatcatcaggattatttgctactgttcccgccagcgcttcagtacgcagcgctttgtcacgccgccgccataaccgttccggactagagccaagaaaagcattttcgccatcaaaggccatgtaaaaatggtagcaattcagattcagtcgacgactggcagccatcatcgccgccgcgttgaccggacttgcgaaatgcaggtcagttgcccgagcgagcaccactttgtcgagctcaccttcggcgatggttttcgttgccagttcgattaattgcgtccagcccgttttgtccggccagtgttgttctcgcgtggtggttaaatgtaacccaggcaagggcttgatactcaccagtgtggcgataaattcttttgcctgaatcgcatcgtgctgaagggagctttcgctgaatagcgtcagccgcagcgtggctttaccgccacagcgtcgccattccaggcggggtaaaagtaaattgccctggctcgggtcaaaagcattcagcccccaaatgcgtaagtcggcgtgttccgggtgctggcgaagaaaacgttgtgcctggtccaagctcgtaaaacgggtaatcgcgcccaggacgacagcttcttcatcaccattacgttgttgccagtagaattgcgggtatgtttgctgactggccagccagctcaaggcatcaaaagcgtctttgagagggaaaggaatatcgataacccgaatgccgggtgtcgccggaatctcttggctcaaatggcgcagtagattttccagcgccgtagtaagactttgcacgcggacctctccctgttaaaagcctcacattatacggggtactacaaaaaaaatgcagtaccccggtgtagggaggttttaacggcgtgccagcaacagtcctagtaccagcccaacggccgcgcccacaccaattccttgccagggtttttcgtggacgtagtcatcagcacgataaactgcctgcttcgcccgatagtaataactgtcactagcctggctaacccgttttttcacatcatccagcgctttttctgcacgcgctttcagctcaacatatttctgatcggcgggatcgccagaggagcggagcacctcttccagtgtttcactaagcagcgtcaggtcgtcatcgatacgtgtatcaccaaactgattagacattctcgttctccatttgcgtaaaacctgtcactaactatagacaagggttgttgattacgcctgaattacctcgcgtgccatcccaatgtgtgggataccatcttcttcatagacctccgtcacagggataaaaccgaaactctggtagaagttttgcagatgcgcctgcgccccgaggtaaacaggcttatcaggccagtgatgcgtacatgtttcgagtgttttactcatcagctgctgccccactttttcgccacgcaacgcttcactgacaatcacccgacctataacgaccggctcaagatcatcatcacttttcagaatcctcgcatacgccaccagttcatcatttttccaaccgagaatatggcgattatcccccgtcaaatcatcaccatcgatatcctgataagggcaattctgctcgacaacaaacaccgcgcaacgcagttgtaataaggcataaagctgggaaacgcttaattcagagtgatgcagatcttgccattcaatcataatgctctccttttagatgtatgccttatactagccggaatattttttgaaacgtgatgaactcatggaattaatttttttaggtactagtgccggtgtgccaacccgcacgcgcaatgtcacggcaatattgcttaacctgcaacatccgacccagagcggactttggttgtttgactgcggtgaaggcacccagcatcagctactgcataccgcctttaaccctggaaaactggacaagatttttatcagtcaccttcatggcgatcatctttttggtttacccggcttgctgtgcagtcgttctatgagtggcattatccaacccttaacgatttatggtccgcaaggtatccgtgaatttgtggaaaccgcgctgcggattagcggcagttggaccgattatccgctggaaattgtcgaaattggcgctggcgaaattctcgatgatggcctgcgcaaagtaaccgcttatccgctggaacacccactggaatgttatggctatcgtattgaagaacatgataaaccgggtgcattaaatgcccaggcattaaaagctgctggcgtgccgcctggcccactgtttcaggaattaaaagcgggcaaaacaatcacgctggaagatggaaggcagattaacggcgcagattacttagctgctccagtgccaggtaaagcgctcgctattttcggcgataccggcccctgcgatgccgcacttgacctggctaaaggtgtcgatgtcatggtgcacgaagcgacgctggatataaccatggaagccaaagccaatagtcgcggccatagctctacacgccaggctgcgacactagcccgtgaggctggagtcggcaagctaatcattacccacgtcagcagccgctatgatgacaaaggttgtcagcacctgttacgtgaatgcaggagtattttcccggcgactgaactggcgaatgatttcaccgtgtttaacgtttaactctgcttattattaaaaacagggcgaaacttgccctgttatcgcaacccgcgctacatatatccacccacacaggcatattgagcgatttttgatatttattcatctccttacgcactatattcagagcaataagttgcctcttttcatcttgattcagcacaacctttgcaactaaaaggagcccatgatggttacagttgtcagcaattattgtcaattatctcaaacgcaactcagtcagacatttgcagaaaaatttactgtgaccgaggaattactgcagtctttaaaaaaaacagcgttatccggagatgaagaaagcattgagttactgcataatattgcgttaggttatgataaatttgggaaagaagctgaagatattctttaccatattgttagaaccccaacaaatgagaccctaagcattatccgacttatcaaaaatgcttgtttaaaattatataatctggcacatatcgcaaccaactcccccctcaaaagtcatgatagtgatgatctcctgttcaaaaaactattctcccctagcaaattaatgacaattatcggtgatgaaattcctcttatatctgaaaaacagagccttagtaaggtgcttttaaatgatgagaataatgaactgagtgatggtacaaacttctgggataaaaatcgtcaattaaccacagatgaaatagcttgctatcttcagaagatcgccgctaatgcaaaaaatactcaagtcaattatcctactggtctctacgtcccctactccaccagaactcacctggaagacgctctcaatgaaaatattaagagcgatccaagttggccgaatgaagtccagttattccccataaatactggcggacactggatattagttagcctacagaaaatagtaaataaaaaaaataataaactacaaataaaatgcgtcatattcaacagtttgcgtgcactaggctatgataaagaaaatagtcttaagcgtgtcattaatagttttaattctgaactcatgggagaaatgagcaataataatataaaagttcatttaaatgaaccagagataatatttttacatgccgatcttcagcaatacttaagccaaagttgcggtgcatttgtgtgcatggcagcccaggaagtgattgaacaaagggaaagcaattctgacagcgccccctatacgttattaaaaaaccatgctgacagatttaaaaaatatagtgcagaagagcagtacgaaattgattttcaacatcgactggcaaacagaaattgttatttagataaatatggcgatgcaaatatcaatcattattatagaaacttagaaataaaacacagtcaacccaaaaatagagcatccggcaaaagagtgagttaacatcattgttaattaattcgaccagtcagcaaatatgctgactggtcgaacatagtttgctaaacagtcatcactgactgatgtcagtcacaccatccgccagttcaatcaggcgaataaattccgccctgtaaccctgtggatcttccccttttgcctgctgagcccactgtttgatctgctgccaggaggtattgttcaggtattcagaaccgcgtaacttttgcccatatgcagctactgctgcgcgaaaacgcatatcttcagagggcgcgtttattgttggccccagcgggaattcaactaactgactttcttttccctgcgggtatttccagcgaatttttaaccaggccagttctttcgttttgtcgcttttcgctaatttgttatccggggcatagcgtaacttatcaatacttgctttttgcccgttcagcgttaattcgaataacaacgttatatgtttgcctgcgcctatatcccctgcatcaacgttgtcgttattaaaatgttccacccgaagttggcgcttttcataaccaatctgacggtattccgttacccacgcggggttaaactcaatttgcgctttgacatcttttgctacggtaatcaacatctgccgcatttcactattcaatactttctgcgcttcagagagggtatcaatgtagctgtagttgccgttaccaacatcggcaattcgcaccatcattgcctcgttgtaattgctattccccacgccaaacgtgctcagagtaacaccagactcccgctgttttttgaccatactttcaatgctttttggatcgtcaatgccaacgttaaagtcaccgtcagtggctaataaaatgcgattgatgccgcccttaataaaccccttcgtcgcctgctgataagccagttccagcccggcaccgccattggtactgccttcggcatccaggctatcaattgcggcattaatttccgccttatgactcccggagatagaaggcaatgcaatacgggagtcgccagcgtaggtcacgatggcaatgttatcctgctcacgaagttctttgaccaataatttcaagctagactggataagtggcaaacgttcatcagaaatcatactaccagaagtgtcgataagaaagaccagattagaagctggtaactcttcacttttgcgatctttcgccaggatatcaactttcagcaatgttcgctgttcattccatggtgcaggtgccaattcgtagcgcatagcgaaaggtattggcttagaggccggaatagattgtttgtctttgatatcccaatcagacgggaaataattgactatctcctccacccgcacagcgtctggcggaggtaacagcccttgattgaggaaacgccttacattcgcataactgccagtgtcaacgtcaagactaaacgtcgccaacggattttgcgctacctgcttaaccggattatcatcgaactgctggtagcgagcggttcctggatttgcgatatgtgtagcttttgctttagccgctcttgcaaatgttggcgcttcctgcaatcgcccctgtaaagcctgtttgtcactatattgttgcacttcttgctgggccaaggctttcgcggcggcggcgctttgctcagcctcttttattgcagcttgctgcgcggcaagcacttgctgctctgtgggagtactgggttgttgttgctgactttccttattctcaggttgcggcccacatccactcaaaatcaaactactcataagcaacatgattatatttttatttcgcatataaaatccttttaaataaactcaggcaccagacataaaatatactctttgtataatcctgctaatcttaataaaatacaatatcgaaacccatagcaaataatgattcaacaacgcaacccattaataatttgcatatgaaaaaaataatctttgcttttattatattatttgtgtttttactccctatgattattttttaccaaccctgggtcaatgcattaccgagtacgccccgacacgcaagtcctgagcaattagaaaaaacagttcgttatcttacacaaactgtgcatccacgtagtgccgacaatattgataatctgaataggtccgcagaatatataaaagaggtctttgtcagtagcggtgccagagttaccagccaggacgtccccattacgggtggcccctacaaaaacattgttgctgattatggtcctgccgatggaccgctgattattattggtgcgcattatgactctgccagcagttatgaaaacgatcaattgacctatacgccgggcgcggatgataacgccagcggtgtggcaggattactcgaactggcacgtttgttacatcagcaagtaccgaaaacaggcgtgcagctggtcgcctatgcgagcgaagaaccgcccttctttcgtagcgatgaaatggggagcgcggtgcatgcagctagccttgagcgtccagtgaaattaatgatagcactggagatgattggctattacgactctgcgcctggaagccagaattacccttacccggcaatgtcctggctttatcccgatcggggagactttattgccgtggtcggcagaatacaggatatcaacgccgttcgtcaggtaaaagcggcattgttgagttctcaggatttatctgtttattctatgaataccccagggtttattcccggtattgatttctctgaccacctgaattattggcaacacgatattcccgccataatgattactgacaccgctttttatcgtaataaacaataccacttgcccggtgataccgcagacagattgaattatcagaaaatggctcaggtagtggatggtgttataactttgttatacaacagtaaataataaaaatttctcgaggcgggtccagaaaaagcgacatgcacattttattttccctcatctgttttaagatgcgaaacatgaaattcaacggaggaaaaataaatgggaatgattggctattttgcagaaattgacagtgaaaagattaaccaactgcttgagtctactgaaaaacctttgatggataatatacatgacacgcttagtggattacgccgactggatattgataaacgctgggattttttacactttgggctgacaggcacctctgcttttgatcccgcgaagaatgatccgctgagtcgtgccgtgcttggtgaacacagcctcgaagatggcatagatggcttccttggattgacctggaatcaggagttagccgcgacaatcgaccgactggaaagtctggatcgaaatgaactgcgtaaacagttttccattaagcgactcaatgaaatggagatttatccgggagtgacctttagtgaagagttagaggggcaactctttgccagcatcatgcttgatatggaaaagctgattagcgcgtatcgacgtatgctgcgacaagggaatcatgcgctgacggttattgttgggtgatatagcttgatgcctgggggagaaagacccattagttaagatttacgccaggatcatcttgaaaaaatctttaaccatggtccggtttttatccccttgtataaatattactaaatgcttgcttagtcgcattgttaaatgcaataccgtatattcggtatgtaacagcgatatcctctgtgctggcaacgatctgtcatgcttgatgaaaacggaattgaacctgtcattaccaggtagataaaaagcctgttcaattttgggattattttttataactcgtgtctgttatggcgacacgggaaaacatcaatattgtccttcacaaattgcagtaatatagaatcaacctctcttgcaagttggtcacaatgtattataagcattttgaatatgtcatcctctgtaatctcgtgaaaattttcggccttgtcttttagctcatcatatcggattcttgcagtaaccattttttgggcgagttctaataaccccaaagcttgcaattgctggtgagtatgatcactttcaaaaaatatcccacactccattccttcccaaccaacatattcatgccattcataaaccagcataaatgtttgtaaaactggcggtaataattggatatctgcaaaaccaaaccaaaacttacgcttgagatcccactcatattcaatcgccaatgctatattgtttaaggcatctccggcatccttatttttacgcaaaatcaattccgtcagtgtatagcgttgttcatcaatacgccgaagagcttctgcaatatcatagtttgtagccaacaaaacattctctgcttcctgatgagtgacgtctgcttttgccgtcaatatattgatttggtcaatatgaaacaacttgatggcttcatcaacatcaccgccagtcctctctaacaaacgtctggcaacctggataccgacaggtacgttcttccgaagtttacgaatttcacttaaccattccatgtcaaacccctttaaatatttatgatattaaatataacaacgtctggataacgacccggcctgactgaatatctcacgttttcctgcttaacattcatgttatgatgctcttgaaactaataatacgtatggaattgtcactatttatctgctaatgaatagtaacaatgtcattcgtttgatgaatatattatttcagggaataattatgacacctttagaacgcattacccaacttgttaatatcaatggtgatgttaataatcctgatactcctcgtccattgttatctcttgaggatttttttattgacaataatatccatggtagtatatgttgcaatgtgattccagaacaatctccgcaagctatctatcaccattttctgaaaatacgtgagcgtaacaatgttagtgatgttttggtagaaattacgatgttcgatgacccagactggccctttagtgaaagtattttagttatcaccactgctagtccagaagaagttcagagctggtttgtagaagaaattgcccctgatgagtgctgggaaggatggagtgaagatacggagcatggatgggttgaagtccctgtgggtatgcatccggttacttgttggtgggattaaaacatttatataaacagataagcggatgtttacataaatttttatgtgaaggaacatgatgaaacttattcctcgcagtagtgatattagtcctggcattgatggaatttgcccggggccttttcctccgaacggatttaccgtacttacagatgcagcatatggtaacggagactgtttcggtttgtactggcctattggtcaggagcataaactacctatagtgtgcgaaacgtaccatgacgaatggcgaatcgtacctgccttttccagcattaagaagttcgaagaatggctggaagtgaatgatgatgatccccatgaaaatggcatcagcatcgaagatcaagactttgcagcaaatctcttccgtgttgctcggaaatgtcttagtacgggaaggcttgatgacgcactgccactgttacagcgagcaacagaacaattgcctgaagtcagcgaatattggttagcactggcaatccagtatcgccgatgtaaaaaaacagaagctgcagcacaggctgcgcttaatgcttatcttggcaattgggcatttggtgttcctgacaataaagtcattcatttgctgagtcaggccgcagatgtcccgaatttccaggatgatcctgtgattcagtgcattaaagaacaaggattagatcttagctttggaggaacaaaggaaaataataattaccccttgatgcagatgtgtgttgatacttattttgcgcagagaaaaccgcttcaggcattaaccctgttacataattatgcctggataatgtccagtgaaacgactgcatttcaggaacgctatgattttaatatcgatgaatggcgggcaaaattcaggcagttatgtttagagtattttggcgatagtcgtacacagttcacttaacgctctgcgtctatctactatcccttctttttcagaaaaaccgccgagcatgtcggcggctttctgacttacaaagtaacagattacatcagcggcattgccaaacgcacaatgctaatcagcggttgtggccatacacccagcaccagtaccaacagtgcagagatcagcacaacgataccgcccgcgctgtactgccagttacttggtgcatcgcgacccggttgttccggggcgtgaagatacaggctcaccgccacgcgcaggtagtagtagaggccgattgcgctaccgacaaccacggcacccaccagccaccacaagtgtgcctggacaccgaccgccagcacgtagaacttaccgataaagcccagcgtcatcgggataccggccagagacagcatcatcaccgtcatcactgccgcgaggatcggacgatgccagaacagaccgcggtaagagaacagggaatcagcatccgggccacgatacgggctggacatcaggctgaccacgccgaacgcgccgaggctgctgaacagataaccggccaggtaaacccctaccgcttccatgctcatctcgccggtttgcagcgcaatcagcgctaccagcagatagccgaggtgagagatagaactgtaaccgagcagacgtttgatattggtctggctcagcgccatcaggttaccgaagatgatggaggcaaaggcgataatcgccagcaccacgcgaatcgcttcgctgtcacccaccggtgcgtagaggaacagacgcatcaccacaccgaagatagcgattttgctcgccgtcgccaggaaagtggaaaccggcgcaggcgcgccctggtatacgtctggcgtccacaggtggaacggcaccagagagagtttgaagccgaggccaacaatcatcaggccgaaacctgccagcaacagcggctcgttgagcataccgtcgccaaggtttttacccaacgcgacaaagctcaggtcgccagactgcgcatacaccagcgccataccaaacagcaggaaagaagacgctgcggcagaaaggatggtgtatttgatactggcttccagactacgtttctggcggaaagcgtaaccgaccaggccaaacagcggcaaagagatcagttcgataccgaggaacagagacgccagatggttggcattcgccagcaggatcccgcccagcgcggcaattaacaccaacaggtagaactcatccttgttgtcgttatagccttcaagccacgggtaggcgaaagtacaggtggcgaggctcgccaacaataccagcccggtgtaaagcatggcgaaaccatcaacgcgcatcagcggcgtaacgtccatagcgcccgcctggccaacaaaccagagcgaaaccagcgccgcgttaagcccaataaccgagagcgtagcgttgaggaaatgattgcgtcgccacgcaatggagagcatcacaaccaccaccgtcaagccgacgatcagcaacggtagcagtgcgatcaggttttgtggagttattgtcatggcgatttacggccttgtagtagtaacggaattaacaaaccactgctggatattgccaatcgcggagtggctggtatccagaatcggctgcggatagaagcccagcagtaccagcagcaccaccagcaacaggatcataaacagctcacgcaggctcatccctggcagttcctggctggcaatctggcttttcgctttaccgaagtaagcgcgatgtaacatcgccaggctataaacagatgcaaagaccagcccaaaggtagagataacggtaatcaccggtacaacctggaagctgccgaacagaatcataaattcgccgacgaagttaccggtgccaggcatcccaagcgttgccaccgcaaagaacaggctcagtgctggcagccatttcatcttgctccacagaccgcccatcatgcgcatgtcgcgggtatggatacgttcataaagctgaccacaaagaataaacagacccgccgcgctcaaaccgtgcgcaatcatctggattaccgcgccctggtaggccaactggctgccggtgtagatagcaatcagcacgaagcccatgtgggaaacgctggtgtaggcgatcagacgtttgatatcggtctgggcgaaggccatccacgcaccgtagaagatgccgataacacccagccacatagcaattggcgcgaactctgcgctcgcgttcgggaacagcggcagggagaaacgcagcaaaccgtaagcggcagttttcagcaagatccccgcgaggtcaacggaaccggcggtcggagcctgggagtgcgcatccggcagccagccatgcagcggaaccaccggcattttgactgcgaaggcgatgaagaagcccagcattaacaggtattccacaccactggacattggcgtattcagcagctcttcatagttgaaggtccagacgccggtcgcattgtagtgaacaaaaaccagcgccaggatggcaatcaacatcaccaggccactcgcctgggtgtaaatgaagaacttggttgccgccgtgatacgcgttttaccgtcagaggctttatgcccccacagtgcgatcaggaagtacatcggcaccagcatcatttcccagaagaagaagaacaggaacatgtcgatggcaaggaacacgccgataacgccgcccaggatccacatcaggttgaggtggaagaagccctgatatttttcgatctctttccagctacatagtaccgccagcacaccgagcagaccggtcagcacgaccatcagcaggctcagcccgtcaatggcgagatgaatagagataccaaaacgcgggatccacggcatgtcgaattcagactgccactgcggaattccggcggattgcgtcagactataaccgccctgcaaccacagttgcaggctcagcgccagcgtcaatcccatggtgatcagcgcgatccagcgtggcaccttgacgccaaagcgttcggtctgccagcacaggaagccgccaataaagggaattaatattagccagggtagtaacatggcgatctttattccttgtaaaagtcccgtcaggaccggattttcaacgaattctcacgacagaaaattctcttcggactgggggtagtgtcggatgcaccgcgaaggcggcttatccgacctacgttcttatatgcccaggggcaatcccacaatccttaactcaacgcagtaccatcaacagtgccagcaccacgaccgcaccgatgctcatggatgccacataccagcgcagatagccgttctcacttaacagcagacctttacctgcaaagcgggaaaggacagccgggatgttcatcatactgttcagcggatcgcgtttcagcaaccaggcaatacccaggaacggcttgacgaacactttgtcatacagccagtcaaatccccaggcgttgtaccaccaggtgcccagcagacggcccggcgcactgttggcgatggaggtcaccagagtacgtttacccagccacagccaggctgccagcagaatgccgaccaccgcgaccacgccagaggtaatttccagggtcaacatgctgccgtgcgccagttccgtcgtttgcggaagcacgccctgcagcggcggtacaatcagtgcgccaacgaaggtggaaaggatcagcagcacaatcagcggcaggctgtgagttacccctttcacggcgtgagcgtgaatttgttcttttccgtggaagacgatgaaaatcatacggaaggtgtagaggctggtcataaacgcaccgaccagacctgccaccatcagattgatatgaccattcgccatcgcacccgcgaggatctcatccttactgaagaagcccgcagtgaccagcggtagtgcgctcagtgctgcgccgcccaccaggaagcagagataaaccagcggaatagatttacgcagaccgcccatcttgaagatgttctgttcgtgatggcaggccagaatgacggaaccggatgccaggaacagcagcgctttaaagaacgcgtgggtcatcaagtggaaaatcgccgcatcccatgcctgcacgccaagcgcgaggaacatgtagccaatctggctcatggtagagtaagcgagaacacgtttgatgtcggtctgtaccagcgcggcaaaaccggccagcagcagcgtaaccgccccgacaatacccaccagatgcagaacttccggcgtcatcaggaacaggccgtgggtacgggcgatcaggtagacacccgcggttaccatggttgcggcgtggatcagcgcggagacaggcgtcgggcccgccatcgcgtcggcaagccatgtctgcaacggcaactgcgcagatttaccgaccgcaccgcccagcagcatcagcgtcgcccacatcagcatgttattgccgtcagcaaagtgcgctggtgccagttccaccatttcgcggaagttcagggtgcccagttcgttgtaaagaatgaacagtgcgaaagcgaggaacacgtcacccacacgggtcacgacgaacgctttcattgccgctgcgccattcttcggatcggtgtaatagaacccgatcagcagataggagcacaggcccacgccttcccagccgaggtacatcagcagcaggttgtcggcaagcaccagaaccaccatgctggcgatgaacaggttggtgtaagcgaagaagcgagagtagccctcttcaccgcgcatataccaggaggcgtacatgtgaataaggaaacccacaccagtgaccacgctgagcatggtcaggctcaggccgtccagcaccaggttaaaaccgatgttaaagtcgcctacgctcatccacgtccacagcggctggctgtatgtctgctcgccgttagcgaagaaatcaacgccgataaaggcggttaccagcgccgccaggcccacagagcctacgccgacgatcgcgctgacgttttcagaccagcgcccacgggagaatgccagcaggacgaagccaatcaatggcaaaataatggttaaggcaagcatgttcatccgcgcatctcacttacactatcgatgttcaggttctggcgacgacggtgaagttgcagcagcagcgcaaggccgatactcgcttctgccgccgcgaggctgatggcgagaatgtacatcacctgaccgtcggtctggccccagtagcttccggcgaccacgaaggccagcgcggaggcgttaatcatgatttccagaccaatcaacataaacagcagattgcgacggataaccagaccggttaagccaagaacgaataagattgccgcgaggatcagtccatgttgtaaggggatcatgcgtgctcctccgtttttcttttcgcgctgtcgtctttacgattgctcagcacttcacccgcacgctcttcacgaccgacgtggaaggccacaaccagacctgcgagcagcagcatagaagccagttccaccgccagtacgtaaggcccgaacagcgtaatacccactgctttagcactgattggcgtaccgtcgataccctgatcgttaacaccgaggatggcgtaaacaatcaccaccagcatgatggcgctcaaaattgccggaccaatccacacctgcggtttcagccactggcgttcctgttcgatttcactaccgcccaggttgagcatcatcaccacgaacacgaacagcaccataatggcacccgcgtagacgataatttccagcgcaccggcgaagtaagcgcccagactgaagaacaccccggaaatcgccagcaggctaataatcaggtacagcagtgcgtgtaccggattggtatgggtgatcactcgcaaggtcgcaagtatggctatcaggccacagatataaaaagcgaactccattgcccctctccttacggtaacaggctcttgacgtcgataggcttggcttcgttctctgcttcgcccttatctttgccgtcgattgccatacctgccatccggtagaagttatattccgggtatttgcccggaccggagatcagcagatcctctttctcgtaaaccagatcctggcgcttgtattcccccatttcgaaatccggggttaactgaatcgccgtggtcggacaggcttcttcgcacagaccacagaaaatgcagcgactgaagttgatgcggaaaaattccgggtaccagcgaccgtctttggtttctgctttttgcaggctgatacagccgaccgggcaggctaccgcgcagaggttacaggctacgcaacgctcttcgccgtccgggtcgcgggtcagaacgatacgaccacgataacggggcggcagatagaccggctcttccgggtacattcgcgtttcgcgtttggcgaacgcgtgcaggccgatcatccagatactacgaacctgggtgccgaaacctactaacaattcttttaaggtcatggtcttattgccccttattgcgcctgccagagaatgacagccgccgttaccagcaagttgatcagcgtcagcggcaggcagattttccagccgaaggacattacctggtcataacgcggacgcggtaagctcgcacgaatcaaaatgaacatcatcataaagaacgcggttttcagcgcgaaccagatgaatggcggtaacaacgggccttgccagccaccgaagaacagcgtcaccatcaatgcagagatggtcacaatcccgatgtactcacccacgaagaacagaccgaacttcataccggaatattcaatgtggtaaccatccgccagttcctgctcggcttccggctggtcaaacgggtgacggtgacataccgccacgcccgcgatggcaaaggtaataaaaccaaagaattgcgggataacgttccacacatgcgcctggctgttgacgatgtcggtcatgttgaaactaccggcctgcgccaccacgcccatcaaggaaagcccgaggaacacttcgtagctcagggtctgcgcagaagcacgcatcgcacccagcaagctgtatttgttgttactactccagcccgcaaacagcaccgcgtaaaccgccagacctgccatcatcaggaagaacaaaatcccgatgttcaggtcggcaaccacccaacccggactgactggcacaatcgcaaaggccagcagcaggctggtaaaggcaatcatcggtgccagggtaaagatgacgcgatcgctgaatttcgggatccagtcttctttaaagaacattttgatcatgtccgcaaccagctggaggctaccgccccagccaacacggttaggtccgtaacggttctggaacagacccagcaggcgacgttcgccaaagctcatgaatgccccgcaggtgacaaccaccagcaggatcaccaccgctttgaggatggtcagcaggatctcaatcagttccggacttatccaactcattgttgtgcctccttgagatcctcaagatgcgcgccagccagcaccggagcaatgccggacatacccatcggcaagcccacctgccctgccgtcagtccttcggcgatttcaaccggcagcgtgaccgtgttgccatcgtaactaaaggagacgcgtgtacctgcgttcacacccaacttcgcggcatccgctgggttgagtttgatgtacggctgcggcatacggctctggaagaccggagcacgctgactcaattcatcgctgccaaacaggtggtaatacggcgcgatacgccatttcccgtcctgcggctggaagcgtgccggtacgctggtgaagtaatccagaccattttcgctggtttcaaacagacgcacgcccggatcgccaaagcgcagtttgccgcccacttcgtcctggaatttgttccacgcctgcggggagttccagcccggcgcccaggcaaacggcacttggctacggtgcgcagtcggctggttgttaccttccatgctgaaggtgaacatggtgtcaatatcctgcggctgacgcggctcatgaacgctgatattggcgcgcatggcggtacgaccgctgtaacggtgcggttcacgggccagtttctgcccacgaatacggaatgtcgcatccggcgcagcatctttgatacctgccagttccgggattttcgccacaacagcgtcaatcacatggtcgagctgcgtccagtccacttcacggctcagcagggtgctgtgcaggctgtgtaaccagcgccagctttccagcatgacagttttgctgtcgtaataagcaggatcgtaaacctggaagaaacgttgggcgcggccttcgttgttgatcaccgtaccgtcgctttcagcaaagctggcagcagaaagtaccagatgggcgttttccataatcgctgtgcgttgatgatcaaccaccatcaccagcggtgctttagccagcgcagcattcacgcggatagcagaagcgtgacgatgcagatcgttttccaacaccaccaccgcgtcggcgcgtccggtttccagttcggttaacgcttcttcaaggctaccgccacccataatgcccagccccatgctgttgacggaacgggcaatcatggtgataccgacgtcagcgccgcgacctttcagggctttcgcgacgttagccgccgcctgaatcacctctaagctaccggcgttcgtcccggagataatcaacggtttcttcgcacctgccagtgcctgcacgatgacgtcgattttgctttgcagctcaggttcgataccgtcaaccgctggtgcagagttatccagcgcatgggcgatggcaaaacctaaacgcgcctgatcttcaaccggtgcgcggtaagtccacgccgcgatatcatccagacgggtgtcatcaacgttggtaacaaacagcggatgcttcgcacgttgaccgatgttgaggattgccgcaatctgccagtcagccactttctgtgctgccgccatttcgcgcgctttacctttcacagcctgacgcactgccagcgcgacgcgcgcgccggtctgggtaacgtcttcgcccagcaccagtaccgcatcgtaagattcgatttcgcgcagagccggagtataaatgccgccttcacgcagcactttcagcgccagttgcagacgttcctgctcaccgtgagcgataccggtgtagaagttttcttcgcccaccagttcacgcagcgcaaagttgctttccacgctggcacgcggagaaccaataccgatcactttcttgctctgacgcagaatatctgccgcgccctgcattgcctgttcggcgttgagggtaatgaaatcatcgccacgacgctgtactggctgacgcggacgatccttcaggttgacgtaaccgtaaccgaaacgaccacggtcgcagaggaagtagtggtttaccgtaccgttgtaacggttttcgatacgacgcagttcgccgtaacgttcaccggggctgatgttacagccgatggaacattgctggcagatgctcggcgcaaactgcatatcccatttacggttgtaacgctcggagtgcgttttgtcggtaaatacgccggtcgggcaaatttcgaccaggttaccggaaaattcgctttccagcgtgccgtcttccgggcgaccgaagtagacgttgtcgtgcgcaccgtaaacgcccagatctgtaccgtcagcgtaatctttgtagtaacgcacacagcggtagcaggcgatgcagcggttcatttcgtgagagatgaatggccccaaatcctgattacggtgggtacgtttggtgaaacggtagcgacggaagctgtgtccggtcatcacaatcatatcctgaagatggcagttaccgccctcttcacataccggacagtcgtgcgggtggttggtcatcaaccactcgaccacgctttcacggaactgtttcgcttcttcgtcgtcaatggaaataaaggtgccatcggaagccggtgtcatacaggacatcaccaggcgaccacgcgtgtcttccgcgttttggtattgcttcaccgcacactggcggcaagcaccgacacttcccagcgccggatgccagcaaaagtaaggaatatcaaggcccagagacagacaagcttccagcaggttgtccgctccgttgacctcgtattctttgccgtctacatgaattgtagccattagcatgcttccagttttctcagtcagagactgagcgttaatcgaaattcggttaccagcgctctttcagcaggttcggctgaatcccattaatcaaatgggtattgctgaacggctgtttgattcccgcctcaaattcttcgcggaaatatttgatggcgctctgtaacggctccactgcaccaggtgcgtgggcacagaaagttttacccgggcctaagaatcgacacagttgctcaagtgtttcgatatcgcccggctgaccttcaccacgctccagcgcacgcagaattttcacgctccacggcagaccgtcgcggcacggcgtacaccagccgcaggactcacgggcgaaaaactcttccaggttacgcaccaggctcaccatgttgatctcatggtcaaccgccatcgccagcgccgtacccagacggctgcccgctttaccgatactttcgaattccatcggcagatcaaggtgcgcttcggtcaggaagtcagtccccgcgccgcctggctgccaggctttaaatttcagaccatcacgcataccaccggcgtaatcttcgaggatctcgcgtgcggtggtgccgaacggcagttcccacagtcccggatttttcacccgaccggagaagcccatcagcttggtgccagcatctttacttttgctgatgttctgataccactccacgccgttagcgaggatcgccggaacgttacacagggtttcgacgttgttgacacaggtcggtttaccccatgcgccggaggttgccgggaagggtggcttgctgcgtgggttagcacgacgtccttccagggagttgattaacgctgtttcttccccgcagatgtagcgccctgccccggtatggacgaacagttcgaaatcgaaacctgttcccataatgtttttgccaagcagacccgcttcggtggcttcggcaatggcacggcgcagattaactgccgcttcgatatattcgccacgcaggaagatgtagccacggtaagctttcagcgcaaacgcggagatgagcataccttccaccagcaggtgcggcagttgctccatcaacaggcggtctttataggtgcccggctccatttcatcggcattacacagcaggtaacggatgttcatggattcgtctttcggcatcaggctccatttcaggccagtgctgaagcccgcgccgccgcgccctttcagaccagcgtcttttacctgattaacgatttcgtccggagacagcccggtcagcgccttacgcgcgccttcgtaaccgtttttgctgcggtattcgtccagccacactggctgtttgtcatcgcgcagacgccaggtcagcggatgcgtttcgggagtacggataatgtttttcatttataccgctccagcagttcagggatcgcttccggggtcagatgcgcgtgagtgtcctcatcgatcatcatgtttggccctttatcacagttccccaggcagcaagttggcagcagcgtaaagcggccatcaaatgtcgtttgccctggtttgatgttcagctttttctcgagcgccgcctgaataccctgataaccgttgatatgacagaccacgctgtcacaataacggatcacatggcgaccaaccggctggcggaagatctgactgtagaacgttgccacaccttcgacgtcgcttgccggaatacccagcacatcggcgatcgcgtggatcgcaccatccggcacccagccacgctgcttctgaacgattttcagcgcttcaatggacgccgcacgcgggtcttcgtagtggtgcatctcgtgctcgatcgcttcacgctctgccgcactcagctcaaaagcctcggtttgtggttgttgattctcgtgcataattagcggtccacatcactcataacaaaatcgatactgcccagataaacaatcaggtcagacaccaggctgccgcggatcgccgccggaatttgctgcaaatgcgcaaagctcggggtacgaacacgggtgcggtaactcatggtgctgccgtcgctggtcaggtagtaactgttgatccctttggtcgcctcaatcatctggaaagattcattggcaggcatcaccggaccccagctcacttgcaggaagtgggtgatcagggtttcgatatgttgcagcgtgcgctctttcggcggcggcgtggtcagcgggtgatccgctttgaacgggccttccggcatgttgttgaggcactgctcaagaatgcgcagactctggcgcagctcttccactttaagcattacgcgggtgtagcagtcagaaacgccaccacccaccgggatttcaaagtcgaagttttcatagccagaataaggacgcgccttacgcacgtcgaagtcgatcccggtagcacgcaggcccgcgccagtggtgccccactccagcgcctctttcgcgccataggcggcaacgccctgggaacgacctttcagaatggtgttttgcagcgccgctttctcgtaagacgccagacgtttcggcatccagtcgaggaactcacgcagcaggcgatcccagccgcgcggcaggtcgtgcgctacgccgccaatacggaaccacgccgggtgcatacggaaaccagtgattgcttccaccagatcgtaaattttctgacgatcggtaaaggcgaagaacactggcgtcattgcgccgacgtcctgaataaaggtgctgatatacagcaggtgactgttgatgcggaacagttcggagagcataacgcgaatgacgttaacgcgatccggcacggtgatcccggccagtttctctaccgccagcacgtaaggcatttcgttaacgcagccgccgaggtattcgatacggtcagtatacggaatgtagctgtgccaggactggcgttcgcccattttctccgcaccacggtggtggtaaccgatgtctggtacgcagtcgacaatctcttcgccatcgagttgcaaaacgatacggaaagccccgtgcgcgctcgggtggttcggaccgaggttgaggaacatgaagtcctcgttttcggtgccgcgcttcatcccccactcttccggtttgaaggtcagggcttccatctccagatcctgtttggctttggtcagctcaaacgggctgaattcggtagcgcgcgccggataatctttacgcagcgggtgacctttccaggtttgcggcatcatgatgcgtcgcaggttcgggtgaccgtcgaaagtaatgccaaacagatcccaggtttcacgctcataccagttagcgttcgggaacagtttggtgaaggtcggtacgtgcaggtcgttttctgccagcgccaccttcagcatgatgtcgcggttacgatcgatagaaatcagatggtagaaaacggaaaaatccgcggcaggtaacccttcgcggtgtgtgcgcagacgttcgtccatgccgtgtaagtcaaacagcatgacgtaaggtttcggcagtttctttaagaaatcgccaacttccagtaattgttcacgcttgatccacacaacgggaaccccggtgcgagtcgcctgaacagtaaaggcatccggcccaaaacggttgcgcagttcgccaatcaccggatcatcaagatgatcgcgggtctgccaggcgggttcttgcgcggttaagtcggtcatattgttcaccattgcaaatggtccgtggtgactgtcggcgcagtaagcttcgcgaaatagatttaggaataagcgaagaaaaatccctttgccgacaggcgcaaattaaatctcgtcaggtgtacgcaggttagttacggcaatgcgttcaccgcgcttgcgttcgcgctcactttgcatattggcgcgataaacgccctgatcgccaaccacccaggagagcggacgacgttctttgccgatagattcctgcaacagcatcagtgcctgcatgtacgcttcaggacgcggcgggcagcccgggatatacacatcaaccgggatgaatttatcgacgccctgcacaacggaataaatatcgtacataccaccagagttggcacaggcacccatactgataacccattttggttccagcatctggtcatacagacgctgaataaccggtgccattttggtaaagcaggttcctgcaaccaccatcaggtcagcctgacgcgggctagcacgcaatacttctgcgccaaaacgcgccacgtcatgcaccgcggtaaagctagtcaccatctcaacgtaacagcaggaaagaccgaagttatacggccaaatactgtttttacgaccccagttaaccatgtcattgagcttgcccataaacacgtttttgttaacttcttgctccagagggtcggttacgatctcctgcttttgcagggggtaacggtcgttctcaccgttgggatctatgcgggtgagcgtataatccatcttaatgcctcgcggttagcgttgacgattagcgatactgttcgtttccgggttcatacgctcgcggcgactacgcgcgggcgtccagtccagcgcgccaatacgcaccagataaaccagacctgccagtaacacaaaaataaaaattgcagcttccacaaagcctacccagccgctttcgcggatagaggtactccatgcgaacagatacagcgcttcaacgtcgaagataacgaagaacatggccaccagataaaacttggcggacaggcgtaagcgggcggagccgacgctgtcgataccggattcaaacggcacgtttttgctcctcgcgcgtgcgcgaccgcctaaaaaccaaccgcctaccagcatcaggcaacacaggccaatggcaacgataagaaagatagcgaatgcccagtgatgagcgatgacttcagtggatgtactcatactcattgcttactcatcaaaagtagcgccagattcactgctcttcacggcagatggacgccacatcgattcatggggaggaataaaaaaaaccttacaatcactgtagaaattcttttatacagctaattgatgtggttttttactcctttctataaccttttgtcaactttaacaaaagtttcttcacattagtttacataatatcaacaccattagcatttaatgccctttcaccccagatccttgacgactccaggataattagatgttgttgaatcgtgtccgttgtgaagcaatggaaaaaatacgggtctattttgacaggaatttgtgtcgattcctccccccaaaagagagtattttcttgatctgtgacacgcttttgtcattccataacaaaaacgcagcaacaaatttacgtattttttaacatcattgtagcaggtgatttttttcaggcgattatttgtgcgttcgggacgtgaatctctggtggttgaaaaatgaacagttttgtacgttctgcactatgcgatgaaggatttttactaaaaaaaagccgctggggtttaaaacacccccagcggctcgttttttacactattgtctcaggaattatctatcgtccgtcgattactcgatatccctttcaatcaacaaactatcatccccttccggagcagacattgggctgtattgccacggattatggtagctctccatcgcctgatagatcacctgggccagctcattattactggacggatcatagcacagcaaatattcggtatcaggtagcggcggtaagccatctactccactcagcacacgcaggtccgggctcatcatctcaaccggccttgccgtcacgccaagaccggctttcactgccgcacgaacggccggaagcgtgctggcgacataagccagtcgccatggaatatctgctttattaagcgtcgccagcaccatatcgcgaaacgggctaggatcatccagcaatacaagagggatcggctcgcctttttgcaatatgtattccgctgcgcagtaccagtgtgttgggctggtacgcaggttcaatgccttaaacgcactaggacgatgggtggttaccatcaaatccacttcctgggattccagcatttctgccatataggcattacgtttaacgcggacatccagcgctaatttcggataaacgctactcacgcgatttaacaggaaaggtaagatcgtatcggcagattcatcactagcaccgatagttaatacgccctgaagattactgaacattaaactactgcaggcctcatcattaaaacgcaggattttcctggcgtaaccaagaagttgaatgccatgttcagttaacagtttgttgcgaccgtgacgagcgaacagttctttcccaacgagttgttccagacgctgcatttgctgacttacggcggactgagtacgacacacagcggcagctgcggcagcaaaagtgttcagatcggcaacagcaacaaatgttctcagcagatcgaggtcgaggttaattatcggacgatttgcacttatcatatattatcacttactggcggctcatactgagctggttaatgctgtgcacacacaaacaagcaattccatttgtaatgtgcctccctggcagtttcatccggaacccggacgaaagtaaaaatgcatatgagttgcactaaaaaagcgactcacattgttccgttataatgcctgaagtagatcacagaatatatcttcagggatcgcatatctattaagttactcactcttttctatttatgacatgcgcgtgtttgtataaatgtaaatgtgagtccttgttccactctcgtgcagcatcgctggtcatacgcgaacacgtaccaacagcaatggtgaggcggcatcaagagcagggatccgtcatttatccgagcattttaccccaaaaaccttttatttataagggtcattgcgaattatctgatgcaaagttatgttatgttaggcaaagtaatcttctattattaataagcacatcaaaacctttttgaatattaaataataattaattagcatcatcctcattcattaattccgcttaacaatagtttcacaccttgcccccattgcgacacctcggaaatcatcacgcagttaaactctccgtaatgaggaaatatcatcatcgcgtttcattagtgaattcttaaatgaggcattttcacacaattatcttacagataaaaaaaccagacttacaattaagaatcagaacaattcactatataacattgcatgtaaagcatatacacctcattattttgtcattattaagttattaacagcacaatcgagccttcccctctggcaaaatcttattctgcagaccttcaaaacaccgtcctgggggagtacattgttctaagctgacttccacggcagggagtggcgataacagcaaaaaaggtcaagattcatgtcccccattgaaaaatccagcaaattagagaatgtctgttatgacatccgtggtccggtgctgaaagaagcaaaacgcctggaagaagaaggtaacaaggtactgaaactgaacatcggcaacccagccccgttcggttttgacgcgccagatgaaatcctcgttgacgtgatacgcaacctgcctaccgctcaagggtattgcgattccaaaggtctttactccgcgcgtaaagccatcatgcagcactaccaggctcgtggcatgcgtgatgttaccgtggaagatatttacatcggcaatggtgtaagcgagcttatcgttcaggcaatgcaggcattgctgaacagcggggacgaaatgttggttcctgcaccagattacccactctggaccgcggcggttagcctttccagcggtaaagcggtgcattatctttgcgatgaatcctctgactggttcccggacctcgatgatattcgcgctaaaattacgcctcgtacgcgtgggatcgttattatcaacccaaataacccaaccggcgcggtatattccaaagagcttttaatggagattgtggagattgcacgtcagcataatctcattatcttcgccgatgaaatttatgacaaaattctctacgacgacgctgagcatcacagtattgcgccgctggcacctgacctgctgaccattacctttaacggactgagcaaaacgtaccgcgttgcaggcttccgtcaggggtggatggtgttgaacgggccgaaaaaacacgccaaaggctacatcgaaggtctggaaatgctggctagtatgcgcctgtgtgctaacgttcctgcgcaacacgccattcagaccgcgctaggtggttatcagagcatcagtgaatttattacccctggcggtcgtctttatgagcagcgtaaccgcgcgtgggaactgatcaacgatattccgggcgtttcctgcgtgaaacctcgtggtgcgctgtatatgttcccgaaaatcgacgccaaacgctttaacattcacgacgatcagaaaatggtgttggatttcctgttgcaggaaaaagttctgttggtgcaagggacggcattcaactggccgtggccggatcacttccgcattgtcacgctaccgcgtgtcgatgatatcgagctgtctttgagcaagttcgcgcgtttcctttctggttatcatcagctgtaatcttaatttcactgccggagattgcatccggcagcgttatcccgccacaatgacctgatgatgtcatcatacgtaaggtcactatgaaacagagccatttttttgcccatctctcccgcctgaaactcattaaccgctggccgctcatgcgcaacgtgcggacggaaaatgtgtccgaacacagtttgcaggtagcgatggtcgcccatgcgctggcagctatcaaaaatcgaaaatttggcggtaatgtcaacgccgaacgtatcgctttactggcgatgtaccacgatgccagtgaagtgctcaccggcgatctccctactccggtgaaatacttcaatagccaaatcgctcaggagtacaaggctattgaaaaaatcgctcagcaaaaactggtcgatatggttccggaagagctgcgggatatctttgcgccgttaattgacgagcatgcatatagcgatgaagaaaaaagcctggtgaaacaggcagatgcactgtgtgcatatctgaaatgtctggaagaactcgcggccggaaataatgaattcttgctggcaaaaacgcgactggaagcgacgcttgaagcgcgtcgcagccaggagatggactacttcatggaaatatttgttcccagcttccatcttagcctcgatgagattagccaggatagtccgctgtaagcagccggagtctgcgtcgcatcaggcaataagcgccggatgcgacatcaggctcttgtcaaaacggaaacagcatcgggatcatcaccacacaaaccgccatcacgataatggtgaacggtacccccaacttcacaaagtcactgaagctgtaatttcccggacctaaaaccagtgtgttaacaggactagaaaccggtgtcataaaggcggcggatgctgccatcgccacgaccatcgcgaatggataagggctcacccccatcgttttggcagcagccagcgcaatcggagccatcaacaccgccgtcgcggtattagagataaatagcccaataaccgcgctcaagacaaacaaacaccccagcatcatatgtggcccgtaaccaccgccaatgtccatcagccctttcaccgccagcgcgacacctcccgttttctgtaatgccacagcaaacggcatcatcccaacgatcaaaataatgctcggccagtgaatggatttataggcgctttcagcatctatacagcggaatttccccatcagcaggcaggcgatgatagcggcaacaggattaggaatttcatctgtcagcattaacgccaccattagcaccagacagaaaatggcatggggtgcctggctgtgcgcgggacttgcttcactcacctcttccggtaagttcagcgctacgaagtcgcggccctgtttggccagcataccgatcagtttccagttacccacaaccaggatgatatcgcccagcagcagaggctcatccgccaggctaccttccagcgccacgccattgcgctttagccccaccacattcagtccgtagcgggtacgaaaaccaatttcgcgcacgcttttaccaatcagttcactctcaggaattaaactaatctctgccatgcccacatcaagggcctggtcagaaaaatactcgccgcgcagtaccatcggctccagcaattgctcactacaaaattgccggagatcgacatcagccgcagacatatcaataagcaaaacgtcacgcgcgcgaaattcagaaaccccattaacgttcacgataacgcgacgaaaacgccgccagcgttcaacaccgatgacgttagcgccataacgctcacgtaatttgagatcatccagccgttgaccaatcattgggcttccggggcgaatagccagacgtcgcgcacgcccggtcagtcgatattcacggataagatcgcgaaaggttcgacgcgtccagccttcgcgctgcggggtctgggtatcccctttcagcatgaaacgcatcactaacatatacaaaatacccagcaccagcacgaccaggccaataggtgttacgctaaagaaactgaagccgtgatagccttcacgcagcaattcactgttgactaccaggttcggcggcgtcgccaccagcgtcatcatgccgctaatcagcccggcaaaacttaacggcatcatcagacgactcgggctcgtttgcatacgcatggcaacgcttaacaccacgggaataaagatagcgacaacgccggtactactcataaacgcgccaagccccgcgacggtcagcatcaacaaaaccaacattttgatttcactattgcccgcaactttgaccagccatgttcccattacggtggcaacaccggtacggaccaaaccatcgccaataataaacaaggcggcaatcaggacaacgttaggatcagaaaagccggaaaatacttctgggactgtcagcgttccgcttaatgcaaacgcgacaataacaaacaaagcgaccgcatccatacgcactctgcccgtcgcaaacaagacgatggcaacggccagtaaactaagaacccaaatcaattcaccgttcacaacttatccttgttaattgagggggatgacttgattctgccataaaaaagccccgacgagacggggctaaatcatgatcaggtgtttcactgaataataacatcgccatttggctgtttggtcacagtaatttgctccagactgtggaggaccaaatcgacctcattcaggcgcggggtatctgccggagcgttaaccgcaatgacatgacaacccgccgccaggccagaaagcacgccagcgggagcatcttccaccaccacacactcctgcggcgcaagccccagcagctgcgcgcctaacagatacgcatcaggttctggttttccgcgcttcactcgctcagcggttacaaacacctctggtgcgggaagcccagctattttatggcgcgctcgcgctaccggcatggagccagaagtcacaatggcccacggaatacctgctttattcaaatgactgagtaaggcgattgcccccggaagcgcggtaataccttcggtttccgtggcctcgatgtgctccagacgcgtaaactcggcggcaatatcagcctcggatttgcccgccataaaatggcgcagagaggtgatcgcctgtttaccgtgaatgaaagccagcacctcttccggcgctaacccatgacgtctggcccagttgctccacgcccgttctaccgcaggcagggaatccaccagcgttccatcaagatcaaacagaaaacctttgcaccgcacgcgggcctcctcaggcattgataatttgattaatttcgttggcgctcaaatggtactgacgcgggcaggcatgccacacattaagcatgcgctgatatttttcccacattggcgtctgggcgttaaaaccgtgagttccggcgtcaaaatgggtatagcgcccttccacattaaccataaagcggacataaccgaggtaacgtgcttcagtggcggcgtcaaagccgaggaaggtgacacgacgttcatcgatggattgctggtcctgcaaattagaccaggaaacatgcaacgcatgatacatctccataatgtcgatgatagtgcggcaggtttcttctttcagctcgccaaactcgcgatccaattcacgcatctgtaatccgtaaccacgctcaataattgtttgcaggcgacggtaacgttcagcatttgccggatcgagcatagtcatcatcttgtactgattagacaaaataagacgttgcgcgttggtcatttccattgttgactcctgtatcactctactacggtgaaaaaaaagaaggctgagtatgccttcttttatatgcgtaatcaggggtcaattacaaatcatcaaggaaagttttatccagttgtttgaaggcgcgcttaagcgtgtcagctaatgcctggtaatcaggcttgccttcaacgggtgccaacacctgtccagactcctgcaatttaccgcgaacttcataaaaccagttaaggattgcagggggtaatggcgtgacagaacgcttgcccagccaccacaatccctgcatgggtaaacttaaggcgaacagggcagtggcaactgccggcccaagctgaccgcccagggcaatctgccagcagagagtaaatacggcgatcggcggcataaaacggatcgcataacgcgtcatcttgataacgcgattttcgacaaagaccggggcaaggcgtttttccagcggccacgtcttactgtaatgctgtccccggcgaaacaagctaaaaaaattaacagaacgattatccggcgtactcatgcttcacctcaacttcacatataaagattcaaaaatttgtgcaaattcacaactcagcgggacaacgttcaaaacattttgtcttccatacccactatcaggtatcctttagcagcctgaaggcctaagtagtacatattcattgagtcgtcaaattcatatacattatgccattggctgaaaattacgcaaaatggcatagactcaagatatttcttccatcatgcaaaaaaaatttgcagtgcatgatgttaatcataaatgtcggtgtcatcatgcgctacgctctatggctccctgacgtttttttagccacgtatcaattataggtacttccatgagcagtaagttagtactggttctgaactgcggtagttctagtctgaaatttgccatcatcgatgcagtaaatggtgaagagtacctttctggtttagccgaatgtttccacctgcccgaagcacgtatcaaatggaaaatggacggcaataaacaggaagcggctttaggtgcaggcgccgctcacagcgaagcgctcaactttatcgttaatactattctggcacaaaaaccagaactgtctgcgcagctgactgctatcggtcaccgtatcgtacacggcggcgaaaagtataccagctccgtagtgatcgatgagtctgttattcagggtatcaaagatgcagcttcttttgcaccgctgcacaacccggctcacctgatcggtatcgaagaagctctgaaatctttcccacagctgaaagacaaaaacgttgctgtatttgacaccgcgttccaccagactatgccggaagagtcttacctctacgccctgccttacaacctgtacaaagagcacggcatccgtcgttacggcgcgcacggcaccagccacttctatgtaacccaggaagcggcaaaaatgctgaacaaaccggtagaagaactgaacatcatcacctgccacctgggcaacggtggttccgtttctgctatccgcaacggtaaatgcgttgacacctctatgggcctgaccccgctggaaggtctggtcatgggtacccgttctggtgatatcgatccggcgatcatcttccacctgcacgacaccctgggcatgagcgttgacgcaatcaacaaactgctgaccaaagagtctggcctgctgggtctgaccgaagtgaccagcgactgccgctatgttgaagacaactacgcgacgaaagaagacgcgaagcgcgcaatggacgtttactgccaccgcctggcgaaatacatcggtgcctacactgcgctgatggatggtcgtctggacgctgttgtattcactggtggtatcggtgaaaatgccgcaatggttcgtgaactgtctctgggcaaactgggcgtgctgggctttgaagttgatcatgaacgcaacctggctgcacgtttcggcaaatctggtttcatcaacaaagaaggtacccgtcctgcggtggttatcccaaccaacgaagaactggttatcgcgcaagacgcgagccgcctgactgcctgatttcacaccgccagctcagctggcggtgctgttttgtaacccgccaaatcggcggtaacgaaagaggataaaccgtgtcccgtattattatgctgatccctaccggaaccagcgtcggtctgaccagcgtcagccttggcgtgatccgtgcaatggaacgcaaaggcgttcgtctgagcgttttcaaacctatcgctcagccgcgtaccggtggcgatgcgcccgatcagactacgactatcgtgcgtgcgaactcttccaccacgacggccgctgaaccgctgaaaatgagctacgttgaaggtctgctttccagcaatcagaaagatgtgctgatggaagagatcgtcgcaaactaccacgctaacaccaaagacgctgaagtcgttctggttgaaggtctggtcccgacacgtaagcaccagtttgcccagtctctgaactacgaaatcgctaaaacgctgaatgcggaaatcgtcttcgttatgtctcagggcactgacaccccggaacagctgaaagagcgtatcgaactgacccgcaacagcttcggcggtgccaaaaacaccaacatcaccggcgttatcgttaacaaactgaacgcaccggttgatgaacagggtcgtactcgcccggatctgtccgagattttcgacgactcttccaaagctaaagtaaacaatgttgatccggcgaagctgcaagaatccagcccgctgccggttctcggcgctgtgccgtggagctttgacctgatcgcgactcgtgcgatcgatatggctcgccacctgaatgcgaccatcatcaacgaaggcgacatcaatactcgccgcgttaaatccgtcactttctgcgcacgcagcattccgcacatgctggagcacttccgtgccggttctctgctggtgacttccgcagaccgtcctgacgtgctggtggccgcttgcctggcagccatgaacggcgtagaaatcggtgccctgctgctgactggcggttacgaaatggacgcgcgcatttctaaactgtgcgaacgtgctttcgctaccggcctgccggtatttatggtgaacaccaacacctggcagacctctctgagcctgcagagcttcaacctggaagttccggttgacgatcacgaacgtatcgagaaagttcaggaatacgttgctaactacatcaacgctgactggatcgaatctctgactgccacttctgagcgcagccgtcgtctgtctccgcctgcgttccgttatcagctgactgaacttgcgcgcaaagcgggcaaacgtatcgtactgccggaaggtgacgaaccgcgtaccgttaaagcagccgctatctgtgctgaacgtggtatcgcaacttgcgtactgctgggtaatccggcagagatcaaccgtgttgcagcgtctcagggtgtagaactgggtgcagggattgaaatcgttgatccagaagtggttcgcgaaagctatgttggtcgtctggtcgaactgcgtaagaacaaaggcatgaccgaaaccgttgcccgcgaacagctggaagacaacgtggtgctcggtacgctgatgctggaacaggatgaagttgatggtctggtttccggtgctgttcacactaccgcaaacaccatccgtccgccgctgcagctgatcaaaactgcaccgggcagctccctggtatcttccgtgttcttcatgctgctgccggaacaggtttacgtttacggtgactgtgcgatcaacccggatccgaccgctgaacagctggcagaaatcgcgattcagtccgctgattccgctgcggccttcggtatcgaaccgcgcgttgctatgctctcctactccaccggtacttctggtgcaggtagcgacgtagaaaaagttcgcgaagcaactcgtctggcgcaggaaaaacgtcctgacctgatgatcgacggtccgctgcagtacgacgctgcggtaatggctgacgttgcgaaatccaaagcgccgaactctccggttgcaggtcgcgctaccgtgttcatcttcccggatctgaacaccggtaacaccacctacaaagcggtacagcgttctgccgacctgatctccatcgggccgatgctgcagggtatgcgcaagccggttaacgacctgtcccgtggcgcactggttgacgatatcgtctacaccatcgcgctgactgcgattcagtctgcacagcagcagtaatctcgtcatcatccgcagctttgcgctgcggatatctgaaccggaaataatcactatttccggttttttattctcttaatttgcattaatcctttctgattatcttgcttaactgcgctgcatcaatgaattgcgccatcccactttgcatacttaccactttgttttgtgcaagggaatatttgcgctatgtccgcaatcactgaatccaaaccaacaagaagatgggcaatgcccgatacgttggtgattatcttttttgttgctattttaaccagccttgccacctgggtagttccggtggggatgtttgacagtcaggaagtgcagtatcaggttgatggtcaaacaaaaacacgcaaagtcgtagatccacacagttttcgcattctgactaacgaagcaggcgaacctgagtatcaccgcgtacagctgttcacgacgggcgatgaacgcccgggcctgatgaacttcccgtttgaaggattaaccagtggaagcaaatacgggacagccgttggcatcatcatgtttatgctggtgattggcggcgcgtttggcattgtgatgcgtacaggaaccattgataacggtatcctggcgcttattc

(The sequence listing continues in the following parts.)
